(19) United States
(12) Patent Application Publication
(10) Pub. No.: US 2019/0023745 A1
(43) Pub. Date: Jan. 24, 2019

(54) METHODS AND COMPOSITIONS FOR ZIKA VIRUS VACCINES

(71) Applicant: The University of North Carolina at Chapel Hill, Chapel Hill, NC (US)

(72) Inventors: Ralph Baric, Haw River, NC (US); Jessica A. Plante, Texas City, TX (US); Jesica Swanstrom, Morrisville, NC (US); Matthew Begley, Durham, NC (US)

(21) Appl. No.: 16/040,267

(22) Filed: Jul. 19, 2018

Related U.S. Application Data
(60) Provisional application No. 62/534,570, filed on Jul. 19, 2017.

(51) Int. Cl. C07K 14/005; C07K 16/10; A61P 31/14

(52) U.S. Cl. CPC C07K 14/005; C07K 16/10; A61P 31/14; A61K 38/00; C12N 2770/24171; C12N 2770/24134; C12N 2770/24122

(57) ABSTRACT

The present invention methods and compositions for treating a Zika virus infection in a subject, comprising administering to the subject an effective amount of an antibody against Zika virus and/or an epitope that induces an immune response to Zika virus.

### PRIORITY STATEMENT

[0001] This application claims the benefit, under 35 U.S.C. § 119(e) of U.S. Provisional Application Ser. No. 62/534,570, filed Jul. 19, 2017, the entire contents of which are incorporated by reference herein.

### STATEMENT OF GOVERNMENT SUPPORT

[0002] This invention was made with government support under Grant Nos. AI100625, AI107731 and AI007151 awarded by the National Institutes of Health. The United States government has certain rights in the invention.

### STATEMENT REGARDING ELECTRONIC FILING OF A SEQUENCE LISTING

[0003] A Sequence Listing in ASCII text format, submitted under 37 C.F.R. § 1.821, entitled 5470-801_ST25.txt, 721,944 bytes in size, generated on Jul. 19, 2018 and filed via EFS-Web, is provided in lieu of a paper copy. This Sequence Listing is incorporated by reference into the specification for its disclosures.

### FIELD OF THE INVENTION

[0004] The present invention is directed to flavivirus vaccines that neutralize Zika virus infection.

### BACKGROUND OF THE INVENTION

[0005] Zika virus (ZIKV) is a mosquito-borne flavivirus responsible for thousands of cases of severe fetal malformations and neurological disease since its introduction to Brazil in 2013. Antibodies to flaviviruses can be protective, resulting in lifelong immunity to re-infection by homologous virus. However, cross-reactive antibodies can complicate flavivirus diagnostics and promote more severe disease, as noted after serial dengue virus (DENV) infections. The endemic circulation of DENV in South America and elsewhere raises concerns that preexisting flavivirus immunity may modulate ZIKV disease and transmission potential.

[0006] Dengue virus (DENV) is the causative agent of dengue fever and dengue hemorrhagic fever. DENV and its mosquito vectors are widely distributed in tropical and subtropical regions and the disease is endemic in over 100 countries. There are no approved vaccines for dengue.

[0007] Dengue virus induced antibody responses are mainly targeted against the envelope (E) protein. Many non-neutralizing antibodies are cross-reactive between the 4 different DENV serotypes (DENV-1-4) and recognize specific epitopes on E that do not attribute to the protection against DENV infections. Highly potent neutralizing antibodies are often targeted against epitopes that require higher order quaternary protein structures that are assembled and displayed on intact virions only. Between serotypes, the neutralizing epitopes differ in structure, complexity and location. These serotype specific neutralizing antibodies render protection against subsequent virus infections of the same serotype.

[0008] The present invention overcomes previous shortcomings in the art by providing compositions and methods directed to antibodies and epitopes for use in diagnostics and vaccines directed to Zika virus.

### BRIEF DESCRIPTION OF THE DRAWINGS

[0009] FIG. 1. Neutralization and binding of DENV and ZIKV by monoclonal antibodies. (Panel A) mAbs elicited by DENV were evaluated for their ability to neutralize and bind DENV-1, DENV-2, DENV-3, DENV-4, ZIKV H/PF/2013, and ZIKV PRVABC59. (Panel B) The ability of the EDE1 mAbs to neutralize ZIKV H/PF/2013 and ZIKV PRVABD59 was confirmed in both U937+DC-SIGN and Vero cells. (Panel C) Binding of the neutralizing EDE1 mAbs and the non-neutralizing EDE2 B7 mAb to DENV-1, DENV-2, DENV-3, DENV-4, and ZIKV H/PF/2013 was assessed via ELISA. Bars for neutralization data (Panels A and B) represent the mean of two replicates with upper and lower 95% confidence intervals. The dashed line indicates the limit of detection for the assay. Non-neutralizing antibodies were assigned a value of twice the limit of detection for visualization. Bars for binding data (Panel C) represent the mean of two replicates with standard deviations.

[0010] FIG. 2. EDE1 C10 protects ZIKV-susceptible mice from infection. Five-week-old type I/II interferon receptor knockout mice on a C57BL/6 backbone received either EDE1 C10 (n=5) or mock (n=5) treatment and were challenged with 10² FFU of ZIKV H/PF/2013. A mock cohort (n=2) was also included. (Panel A) Survival and (Panel B) weight loss was monitored and differences between the mock-treated and EDE1 C10-treated cohorts.

[0011] FIG. 3. Neutralization of DENV and ZIKV by DENV primary sera. Geometric mean titers of (Panel A) DENV-1 primary sera, (Panel B) DENV-2 primary sera, (Panel C) DENV-3 primary sera, and (Panel D) and DENV-4 primary sera. Points represent individual sera, and horizontal lines represent the geometric mean titers of all sera with upper and lower 95% confidence intervals. The dashed line indicates the limit of detection for the assay. Non-neutralizing sera were assigned a value of one-half of the limit of detection for visualization and calculation of the geometric means and confidence intervals.

[0012] FIG. 4. Neutralization of DENV and ZIKV by DENV secondary sera. Geometric mean titers of DENV secondary sera. Points represent individual sera, and horizontal lines represent the geometric mean titers of all sera with upper and lower 95% confidence intervals. The dashed line indicates the limit of detection for the assay. Non-neutralizing sera were assigned a value of one-half of the limit of detection for visualization and calculation of the geometric means and confidence intervals.

[0013] FIG. 5. Neutralization curves of DENV primary sera with ZIKV H/PF/2013. Neutralization curves for primary (Panel A) DENV-1, (Panel B) DENV-2, (Panel C) DENV-3, and (Panel D) DENV-4 sera against ZIKV H/PF/2013 in a U937+DC-SIGN assay.

[0014] FIG. 6. Neutralization curves of DENV secondary sera with ZIKV H/PF/2013. Neutralization curves for all DENV secondary sera against ZIKV H/PF/2013 in a U937+DC-SIGN assay.

[0015] FIG. 7. CryoEM micrographs of the uncomplexed ZIKV control and the Fab C10-ZIKV complex samples at various pH levels. The deformed particles and aggregates are indicated with gray and black arrows, respectively. The right upper corner inset shows a quarter of a 2D class average of the round particles. The E protein layer is indicated with an arrow, the outer and inner leaflets of the bilayer lipid membrane with arrows. In the pH5.0 uncomplexed ZIKV control, the E protein layer is missing in the 2D class average. Bottom right inset in the pH5.0 uncomplexed ZIKV control is a median filtered (5×5 pixel) image that showed particles with hair-like protrusions, which are likely the E proteins flopping on the virus surface. Scale bar is 500 Å.

[0016] FIGS. 8a-8c. Fourier shell correlation plots for the cryoEM maps of the ZIKV-C10 complexes.

### SUMMARY OF THE INVENTION

[0017] In one aspect, the present invention provides a method of treating a Zika virus infection in a subject, comprising administering to the subject an effective amount of an EDE1 antibody and/or an epitope that binds an EDE1 antibody.

[0018] In a further aspect, the present invention provides a method of protecting a subject from the effects of Zika virus infection, comprising administering to the subject an effective amount of an EDE1 antibody and/or an epitope that binds an EDE1 antibody.

[0019] In an additional aspect, the present invention provides a method of protecting a fetus from the effects of Zika virus infection, comprising administering to the mother of the fetus an effective amount of an EDE1 antibody and/or an epitope that binds an EDE1 antibody.

[0020] Furthermore, the present invention provides a method of reducing the complications caused by Zika virus infection in a subject, comprising administering to the subject an effective amount of an EDE1 antibody and/or an epitope that binds an EDE1 antibody.

[0021] Also provided herein is a method of neutralizing Zika virus, comprising contacting the Zika virus with an EDE1 antibody.

[0022] Additionally, the present invention provides a method of treating a disorder caused by Zika virus infection in a subject, comprising administering to the subject an effective amount of an EDE1 antibody and/or an epitope that binds an EDE1 antibody.

[0023] In a further aspect, the present invention provides a method of producing an immune response to a Zika virus in a subject, comprising administering to the subject an effective amount of an epitope that binds an EDE1 antibody.

[0024] In another aspect, the present invention provides a method of preventing a Zika virus infection in a subject, comprising administering to the subject an effective amount of an EDE1 antibody and/or an epitope that binds an EDE1 antibody.

[0025] Further provided herein is a method of identifying the presence of a Zika virus neutralizing epitope in a chimeric Zika virus vaccine, comprising contacting the chimeric vaccine with an EDE1 antibody and detecting binding of the EDE1 antibody to the chimeric vaccine, thereby identifying the presence of a Zika virus neutralizing epitope in the chimeric Zika virus vaccine.

[0026] In an additional aspect, the present invention provides a method of identifying an immunogenic composition that induces a neutralizing antibody to a Zika virus in a subject, the method comprising a) contacting a biological sample from a subject that has been administered the immunogenic composition with an epitope that binds an EDE1 antibody; b) determining if the biological sample comprises an antibody that binds the epitope that binds an EDE1 antibody; and c) identifying the immunogenic composition as inducing a neutralizing antibody to a Zika virus in the subject if the biological sample comprises an antibody that binds to the epitope that binds an EDE1 antibody.

[0027] As a further aspect, the present invention provides a method of identifying an immunogenic composition that induces a neutralizing antibody to a Zika virus in a subject, the method comprising: a) administering an immunogenic composition comprising a Zika virus antigen to the subject in an amount effective to induce antibodies against the Zika virus antigen; b) contacting a biological sample from the subject with an epitope that binds an EDE1 antibody; c) determining if the biological sample comprises an antibody that binds epitope that binds an EDE1 antibody; and d) identifying the immunogenic composition as inducing a neutralizing antibody to a Zika virus in the subject if the biological sample comprises an antibody that binds to the epitope that binds an EDE1 antibody.

[0028] The present invention also provides a method of identifying a neutralizing antibody to a Zika virus, comprising: a) contacting an antibody with an epitope that binds an EDE1 antibody under conditions whereby formation of an antibody/antigen complex can occur; and b) detecting formation of an antibody/antigen complex, thereby identifying a neutralizing antibody to a Zika virus.

[0029] Further provided herein is a method of identifying a neutralizing antibody to a Zika virus in a biological sample from a subject, comprising: a) contacting the biological sample comprising an antibody, or suspected of comprising an antibody, with an epitope that binds an EDE1 antibody under conditions whereby formation of an antibody/antigen complex can occur; and c) detecting formation of an antibody/antigen complex, thereby identifying a neutralizing antibody to a Zika virus in the biological sample.

[0030] In further aspects, the present invention provides a chimeric dengue virus envelope protein comprising a dengue virus backbone from DENV1 (GenBank Accession No. U88535.1), DENV2 (GenBank Accession No. GU289914.1), DENV3 (GenBank Accession No. JQ411814.1) or DENV4 (GenBank Accession No. KJ160504.1) in which a set of amino acid residues are substituted to introduce an EDE1 epitope that induces a neutralizing antibody response to Zika virus.

[0031] Additionally provided herein is a chimeric flavivirus E glycoprotein comprising amino acid residue substitutions that introduce a heterologous epitope that induces an antibody response to Zika virus, selected from the group consisting of: a) Zika virus backbone with DENV1 “5J7” epitope; b) Zika virus backbone with DENV2 “5J7” epitope; c) Zika virus backbone with DENV3 “5J7” epitope; d) Zika virus backbone with DENV4 “5J7” epitope; e) a DENV1 backbone with “5J7” Zika epitope; f) a DENV2 backbone with “5J7” Zika epitope; g) a DENV3 backbone with “5J7” Zika epitope; h) a DENV4 backbone with “5J7” Zika epitope; i) a DENV1 backbone with EDIII from Zika; j) a DENV2 backbone with EDIII from Zika; k) a DENV3 backbone with EDIII from Zika; 1) a DENV4 backbone with EDIII from Zika; m) a DENV1 backbone with “Z20” Zika epitope; n) a DENV2 backbone with “Z20” Zika epitope; o) a DENV3 backbone with “Z20” Zika epitope; p) a DENV4 backbone with “Z20” Zika epitope; q) a DENV1 backbone with “Z3L1” Zika epitope; r) a DENV2 backbone with “Z3L1” Zika epitope; s) a DENV3 backbone with “Z3L1” Zika epitope; t) a DENV4 backbone with “Z3L1” Zika epitope; u) a DENV1 backbone with “Z20” and “Z3L1” Zika epitopes; v) a DENV2 backbone with “Z20” and “Z3L1” Zika epitopes; w) a DENV3 backbone with “Z20” and “Z3L1” Zika epitopes; and x) a DENV4 backbone with “Z20” and “Z3L1” Zika epitopes.

[0032] The present invention additionally provides a chimeric flavivirus E glycoprotein comprising substitutions in the amino acid sequence that ablate an epitope that induces an immune response to Zika virus, selected from the group consisting of: a) a Zika virus backbone with “Z20” epitope ablation by DENV1 (SEQ ID NO:37); b) a Zika virus backbone with “Z20” epitope ablation by DENV2 (SEQ ID NO:38); c) a Zika virus backbone with “Z20” epitope ablation by DENV3 (SEQ ID NO:39); d) a Zika virus backbone with “Z20” epitope ablation by DENV4 (SEQ ID NO:40); e) a Zika virus backbone with “Z3L1” epitope ablation by DENV1 (SEQ ID NO:41); f) a Zika virus backbone with “Z3L1” epitope ablation by DENV2(SEQ ID NO:42); g) a Zika virus backbone with “Z3L1” epitope ablation by DENV3 (SEQ ID NO:43); h) a Zika virus backbone with “Z3L1” epitope ablation by DENV4 (SEQ ID NO:44); i) a Zika virus backbone with “Z20” and “Z3L1” epitope ablation by DENV1 (SEQ ID NO:45); j) a Zika virus backbone with “Z20” and “Z3L1” epitope ablation by DENV2 (SEQ ID NO:46); k) a Zika virus backbone with “Z20” and “Z3L1” epitope ablation by DENV3 (SEQ ID NO:47); 1) a Zika virus backbone with “Z20” and “Z3L1” epitope ablation by DENV4 (SEQ ID NO:48); m) Zika virus backbone with EDE1 epitope ablation by tamana bat virus (SEQ ID NO:52); n) Zika virus backbone with core ablation by tamana bat virus (SEQ ID NO:50); o) Zika virus backbone with EDE1 epitope and core ablation by tamana bat virus (SEQ ID NO:51); p) DENV1 backbone with EDE1 epitope ablation by tamana bat virus (SEQ ID NO:56); q) DENV1 backbone with core ablation by tamana bat virus (SEQ ID NO:54); r) DENV1 backbone with EDE1 epitope and core ablation by tamana bat virus (SEQ ID NO:55); s) DENV2 backbone with EDE1 epitope ablation by tamana bat virus (SEQ ID NO:59); t) DENV2 backbone with core ablation by tamana bat virus (SEQ ID NO:57); u) DENV2 backbone with EDE1 epitope and core ablation by tamana bat virus (SEQ ID NO:58); v) DENV3 backbone with EDE1 epitope ablation by tamana bat virus (SEQ ID NO:62); w) DENV3 backbone with core ablation by tamana bat virus (SEQ ID NO:60); x) DENV3 backbone with EDE1 epitope and core ablation by tamana bat virus (SEQ ID NO:61); y) DENV4 backbone with EDE1 epitope ablation by tamana bat virus (SEQ ID NO:65); z) DENV4 backbone with core ablation by tamana bat virus (SEQ ID NO:63); and aa) DENV4 backbone with EDE1 epitope and core ablation by tamana bat virus (SEQ ID NO:64).

### DETAILED DESCRIPTION OF THE INVENTION

[0033] The present invention is based on the unexpected discovery of antibodies that neutralize Zika virus and epitopes useful in eliciting an immune response to Zika virus. Thus, in one embodiment, the present invention provides a method of treating a Zika virus infection in a subject, comprising administering to the subject an effective amount of an EDE1 antibody and/or an epitope that binds an EDE1 antibody.

[0034] Also included is a method of protecting a subject from the effects of Zika virus infection, comprising administering to the subject an effective amount of an EDE1 antibody and/or an epitope that binds an EDE1 antibody.

[0035] Further included is a method of protecting a fetus from the effects of Zika virus infection, comprising administering to the mother of the fetus an effective amount of an EDE1 antibody and/or an epitope that binds an EDE1 antibody.

[0036] A method is also provided of reducing the complications caused by Zika virus infection in a subject, comprising administering to the subject an effective amount of an EDE1 antibody and/or an epitope that binds an EDE1 antibody.

[0037] In addition, the present invention provides a method of neutralizing Zika virus, comprising contacting the Zika virus with an EDE1 antibody.

[0038] Also provided herein is a method of treating a disorder caused by Zika virus infection in a subject, comprising administering to the subject an effective amount of an EDE1 antibody and/or an epitope that binds an EDE1 antibody.

[0039] Furthermore, the present invention provides a method of producing an immune response to a Zika virus in a subject, comprising administering to the subject an effective amount of an epitope that binds an EDE1 antibody.

[0040] Additionally, the present invention provides a method of preventing a Zika virus infection in a subject, comprising administering to the subject an effective amount of an EDE1 antibody and/or an epitope that binds an EDE1 antibody.

[0041] An EDE1 antibody of this invention can be a monoclonal antibody, a polyclonal antibody, a humanized antibody, an antibody fragment, a short chain variable fragment (scFv) or any other type of antibody now known or later identified. The EDE1 antibody can also be an “EDE1-like” antibody, which is an antibody that binds all or a portion of the residues identified in a EDE1 epitope to mediate binding and/or neutralization. Nonlimiting examples of EDE1 antibodies of this invention include C8 and C10. The production of C8 and C10 antibodies is described herein.

[0042] The present invention also provides compositions, including a chimeric dengue virus envelope protein comprising a dengue virus backbone from DENV1 (e.g., GenBank Accession No. U88535.1), DENV2 (e.g., GenBank Accession No. GU289914.1), DENV3 (e.g., GenBank Accession No. JQ411814.1) or DENV4 (e.g., GenBank Accession No. KJ160504.1) in which a set of amino acid residues are substituted to introduce an EDE1 epitope that induces a neutralizing antibody response and/or other immune response to Zika virus.

[0043] In some embodiments, the dengue virus envelope protein can be DENV1 and the amino acid substitutions include one or more of the following: L46V, K47T, V55E, N67D, T68M, T69A, T70S, T81Y, V83D, E84K, S138R, 1140M, Q148H, Q150D, G159R, T176G, D177G, A180S, S225D, K247R, E249T, Q271E, T272M, S273D, T278R, T293R, E309T, Q323E, K325Q, E362T, K363S, and/or P364K in any combination, to introduce a Zika C10 epitope into DENV1.

[0044] In some embodiments, the dengue virus envelope protein can be DENV1 and the amino acid substitutions include one or more of the following: N67D, T68M, T69A, T70S, V83D, E84K, S138R, Q14811, 11158N, K247R, E249T, S273D, T278R, E311I, and/or Q323E, in any combination, to introduce a Zika C8 epitope into DENV1.

[0045] In some embodiments, the dengue virus envelope protein can be DENV2 and the amino acid substitutions include one or more of the following: I46V, K47T, Q52N, T55E, N67D, T68M, T69A, T70S, E71D, S81Y, N83D, E84K, I113L, T138R, V140M, E148H, A150D, G159R, T176G, T180S, K247R, D249T, Q271E, S273D, S274G, L278R, Q293R, V309T, R323E, D362T, and/or P364K in any combination, to introduce a Zika C10 epitope into DENV2.

[0046] In some embodiments, the dengue virus envelope protein can be DENV2 and the amino acid substitutions include one or more of the following: N67D, T68M, T69A, T70S, E71D, N83D, E84K, I113L, E148H, H158N, K247R, D249T, S273D, S274G, V309T, E311I, and/or R323E, in any combination, to introduce a Zika C8 epitope into DENV2.

[0047] In some embodiments, the dengue virus envelope protein can be DENV3 and the amino acid substitutions include one or more of the following: Q46V, K47T, Q52N, T55E, N67D, I68M, T69A, T70S, V81Y, P83D, E84K, T138R, 1140M, Q148H, Q150D, G159R, P174G, E175G, T178S, T223D, K245R, E247T, Q269E, N270M, S271D, S276R, E291R, K307T, K321E, E323Q, E360T, E361S, and/or P362K, in any combination, to introduce a Zika C10 epitope into DENV3.

[0048] In some embodiments, the dengue virus envelope protein can be DENV3 and the amino acid substitutions include one or more of the following: N67D, I68M, T69A, T70S, P83D, E84K, Q148H, Q158N, K245R, E247T, S271D, K307T, E3091, and/or K321E, in any combination, to introduce a Zika C8 epitope into DENV3.

[0049] In some embodiments, the dengue virus envelope protein can be DENV4 and the amino acid substitutions include one or more of the following: N67D, I68M, T69A, T70S, A71D, T72S, K83D, E84K, V113L, T148H, H158N, D249T, G273D, D274G, D309T, E311E, and/or K323E, in any combination, to introduce a Zika C10 epitope into DENV4.

[0050] In some embodiments, the dengue virus envelope protein can be DENV4 and the amino acid substitutions include one or more of the following: T46V, K47T, E52N, L55E, N67D, I68M, T69A, T70S, A71D, T72S, K83D, E84K, V113L, T138R, V140M, T148H, A150D, G159R, P176G, D177G, E180S, D249T, D271E, S272M, G273D, D274G, H278R, D309T, R323E, K325Q, N362T, and/or V364K, in any combination, to introduce a Zika C8 epitope into DENV4.

[0051] The present invention additionally provides other chimeric flavivirus E glycoproteins comprising amino acid residue substitutions that introduce a heterologous epitope that induces an antibody response and/or other immune response to Zika virus. Nonlimiting examples of such chimeric flavivirus E glycoproteins include a) Zika virus backbone with DENV1 “5J7” epitope (e.g., SEQ ID NO:13); b) Zika virus backbone with DENV2 “5J7” epitope (e.g., SEQ ID NO:14); c) Zika virus backbone with DENV3 “5J7” epitope (e.g., SEQ ID NO:15); d) Zika virus backbone with DENV4 “5J7” epitope (e.g., SEQ ID NO:16); e) a DENV1 backbone with “5J7” Zika epitope (e.g., SEQ ID NO:17); f) a DENV2 backbone with “5J7” Zika epitope (e.g., SEQ ID NO:18); g) a DENV3 backbone with “5J7” Zika epitope (e.g., SEQ ID NO:19); h) a DENV4 backbone with “5J7” Zika epitope (e.g., SEQ ID NO:20); i) a DENV1 backbone with EDIII from Zika (comprising residues 1-299 of DENV1 followed by residues 306-404 of Zika virus) (e.g., SEQ ID NO:21); j) a DENV2 backbone with EDIII from Zika; comprising residues 1-299 of DENV2 followed by residues 306-404 of Zika virus) (e.g., SEQ ID NO:22); k) a DENV3 backbone with EDIII from Zika; (comprising residues 1-297 of DENV3 followed by residues 306-404 of Zika virus) (e.g., SEQ ID NO:23); 1) a DENV4 backbone with EDIII from Zika (comprising residues 1-299 of DENV4 followed by residues 306-404 of Zika virus) (e.g., SEQ ID NO:24); m) a DENV1 backbone with “Z20” Zika epitope (e.g., SEQ ID NO:25); n) a DENV2 backbone with “Z20” Zika epitope (e.g., SEQ ID NO:26); o) a DENV3 backbone with “Z20” Zika epitope (e.g., SEQ ID NO:27); p) a DENV4 backbone with “Z20” Zika epitope (e.g., SEQ ID NO:28); q) a DENV1 backbone with “Z3L1” Zika epitope (e.g., SEQ ID NO:29); r) a DENV2 backbone with “Z3L1” Zika epitope (e.g., SEQ ID NO:30); s) a DENV3 backbone with “Z3L1” Zika epitope (e.g., SEQ ID NO:31); t) a DENV4 backbone with “Z3L1” Zika epitope (e.g., SEQ ID NO:32); u) a DENV1 backbone with “Z20” and “Z3L1” Zika epitopes (e.g., SEQ ID NO:33); v) a DENV2 backbone with “Z20” and “Z3L1” Zika epitopes (e.g., SEQ ID NO:34); w) a DENV3 backbone with “Z20” and “Z3L1” Zika epitopes (e.g., SEQ ID NO:35); x) a DENV4 backbone with “Z20” and “Z3L1” Zika epitopes (e.g., SEQ ID NO:36); y) a Zika virus backbone with a DENV1 C10 epitope (SEQ ID NO:66); z) a Zika virus backbone with a DENV2 C10 epitope (SEQ ID NO:67); aa) a Zika virus backbone with a DENV3 C10 epitope (SEQ ID NO:68); bb) a Zika virus backbone with a DENV4 C10 epitope (e.g., SEQ ID NO:69); cc) a Zika virus backbone with a DENV1 C10 epitope (non-neurotropic) (e.g., SEQ ID NO:70); dd) a Zika virus backbone with a DENV2 C10 epitope (non-neurotropic (e.g., SEQ ID NO:71); ee) a Zika virus backbone with a DENV3 C10 epitope (non-neurotropic) (e.g., SEQ ID NO:72); ff) a Zika virus backbone with a DENV4 C10 epitope (non-neurotropic) (e.g., SEQ ID NO:73); gg) a Zika virus backbone with a DENV1 C8 epitope (e.g., SEQ ID NO:74); hh) a Zika virus backbone with a DENV2 C8 epitope (e.g., SEQ ID NO:75); ii) a Zika virus backbone with a DENV3 C8 epitope (e.g., SEQ ID NO:76); jj) a Zika virus backbone with a DENV4 C8 epitope (e.g., SEQ ID NO:77); kk) a DENV1 backbone with a ZIKV C10 epitope (e.g., SEQ ID NO:78); 11) a DENV2 backbone with a ZIKV C10 epitope (e.g., SEQ ID NO:79); mm) a DENV3 backbone with a ZIKV C10 epitope (SEQ ID NO:80); nn) a DENV4 backbone with a ZIKV C10 epitope (e.g., SEQ ID NO:81); oo) a DENV1 backbone with a ZIKV C10 epitope (neurotropic) (e.g., SEQ ID NO:82); pp) a DENV2 backbone with a ZIKV C10 epitope (neurotropic) (e.g., SEQ ID NO:83); qq) a DENV3 backbone with a ZIKV C10 epitope (neurotropic) (e.g., SEQ ID NO:84); rr) a DENV4 backbone with a ZIKV C10 epitope (neurotropic) (e.g., SEQ ID NO:85); ss) a DENV1 backbone with a ZIKV C8 epitope (e.g., SEQ ID NO:86); tt) a DENV2 backbone with a ZIKV C8 epitope (e.g., SEQ ID NO:87); uu) a DENV3 backbone with a ZIKV C8 epitope (e.g., SEQ ID NO:88); and vv) a DENV4 backbone with a ZIKV C8 epitope (e.g., SEQ ID NO:89).

[0052] Chimeric flavivirus E glycoproteins of this invention can be made by introducing substituted amino acid residues that make up a heterologous epitope into a flavivirus E glycoprotein. The amino acid residues to be substituted to produce a chimeric flavivirus E glycoprotein of this invention are identified in Tables 10-35 herein.

[0053] A “heterologous epitope” as used herein can be an epitope that is introduced into an amino acid sequence by substituting amino acid residues and is an epitope that was not previously present in the amino acid sequence in which the substitutions have been made. The introduction of a heterologous epitope allows for the production of multivalent compositions to use for example to induce an immune response. Nonlimiting examples include the chimeric flavivirus E glycoproteins described herein. As a particular example, by introducing the C10 epitope from Zika virus into a DENV1 backbone amino acid sequence by substitution of residues, the resulting chimeric polypeptide can be used to induce an immune response to both Zika virus and DENV1. In some embodiments, the chimeric polypeptide can be a flavivirus E glycoprotein or active fragment or portion thereof. An active fragment or portion thereof is the fragment or portion that is sufficient to induce an immune response.

[0054] The chimeric polypeptides and/or other molecules that comprise an epitope of this invention (e.g., a synthetic backbone comprising amino acid residues that make up a C8 or a C10 epitope) can be used in a variety of diagnostic and therapeutic methods. Thus, the present invention provides a method of treating a Zika virus infection in a subject, comprising administering to the subject an effective amount of the chimeric flavivirus E glycoprotein and/or polypeptide that comprises an epitope that induces a neutralizing antibody response and/or other immune response to Zika virus.

[0055] Furthermore, the present invention provides a method of protecting a subject from the effects of Zika virus infection, comprising administering to the subject an effective amount of the chimeric flavivirus E glycoprotein and/or polypeptide that comprises an epitope that induces a neutralizing antibody response and/or other immune response to Zika virus.

[0056] The present invention additionally provides a method of protecting a fetus from the effects of Zika virus infection, comprising administering to the mother of the fetus an effective amount of the chimeric flavivirus E glycoprotein and/or polypeptide that comprises an epitope that induces a neutralizing antibody response and/or other immune response to Zika virus.

[0057] Also provided herein is a method of reducing the complications caused by Zika virus infection in a subject, comprising administering to the subject an effective amount of the chimeric flavivirus E glycoprotein and/or polypeptide that comprises an epitope that induces a neutralizing antibody response and/or other immune response to Zika virus.

[0058] A method is also provided of treating a disorder caused by Zika virus infection in a subject, comprising administering to the subject an effective amount of the chimeric flavivirus E glycoprotein and/or polypeptide that comprises an epitope that induces a neutralizing antibody response and/or other immune response to Zika virus.

[0059] Further provided herein is a method of producing an immune response to a Zika virus in a subject, comprising administering to the subject an effective amount of the chimeric flavivirus E glycoprotein and/or polypeptide that comprises an epitope that induces a neutralizing antibody response and/or other immune response to Zika virus.

[0060] In addition, the present invention provides a method of preventing a Zika virus infection in a subject, comprising administering to the subject an effective amount of the chimeric flavivirus E glycoprotein and/or polypeptide that comprises an epitope that induces a neutralizing antibody response and/or other immune response to Zika virus.

[0061] In some embodiments, the chimeric flavivirus E glyprotein can be present in a virus particle, a virus like particle (VLP), and/or a composition for administration as a protein vaccine or therapeutic. In some embodiments, the chimeric flavivirus E glycoprotein can be encoded in nucleic acid that can be naked nucleic acid, nucleic acid in a virus particle, and/or nucleic acid in a composition for administration as a nucleic acid vaccine or therapeutic.

[0062] In further embodiments of this invention, a flavivirus E glycoprotein is provided that comprises substitutions in the amino acid sequence that ablate an epitope that induces an immune response to Zika virus. Such “null mutants” can be used for various diagnostic and prognostic purposes. For example, a null mutant of this invention can be included in an assay to measure the fraction of a neutralizing response from a natural infection or a vaccination that targets the quaternary conformation epitopes described herein. The null mutants of this invention can also be used in assays to identify the presence and/or strength of an immune response to a vaccination and such information can be used, for example, to monitor immune status, guide decisions on further immunization and the like, as would be known in the art. In some embodiments, the null mutants of this invention can be used to track the proportion of an immune response directed to EDE and further classify antibodies as more EDE1-like or EDE2-like, e.g., by comparing antibody neutralization and binding results of these null mutants to their wild type parental strains. Such information is useful in determining how prevalent EDE-like antibodies are in naturally occurring individuals and in designing DENV and Zika vaccines that preferentially elicit EDE-like antibodies.

[0063] Non-limiting examples of such “null” polypeptides (null mutants) include a) a Zika virus backbone with “Z20” epitope ablation by DENV1; b) a Zika virus backbone with “Z20” epitope ablation by DENV2; c) a Zika virus backbone with “Z20” epitope ablation by DENV3; d) a Zika virus backbone with “Z20” epitope ablation by DENV4; e) y) a Zika virus backbone with “Z3L1” epitope ablation by DENV1; f) a Zika virus backbone with “Z3L1” epitope ablation by DENV2; g) a Zika virus backbone with “Z3L1” epitope ablation by DENV3; h) a Zika virus backbone with “Z3L1” epitope ablation by DENV4; i) a Zika virus backbone with “Z20” and “Z3L1” epitope ablation by DENV1; j) a Zika virus backbone with “Z20” and “Z3L1” epitope ablation by DENV2; k) a Zika virus backbone with “Z20” and “Z3L1” epitope ablation by DENV3; 1) a Zika virus backbone with “Z20” and “Z3L1” epitope ablation by DENV4; m) Zika virus backbone with EDE1 epitope ablation (e.g., by substitutions from the amino acid sequence of tamana bat virus); n) Zika virus backbone with core ablation (e.g., by substitutions from the amino acid sequence of tamana bat virus); o) Zika virus backbone with EDE1 epitope and core ablation (e.g., by substitutions from the amino acid sequence of tamana bat virus)p) DENV1 backbone with EDE1 epitope ablation (e.g., by substitutions from the amino acid sequence of tamana bat virus); q) DENV1 backbone with core ablation (e.g., by substitutions from the amino acid sequence of tamana bat virus); r) DENV1 backbone with EDE1 epitope and core ablation (e.g., by substitutions from the amino acid sequence of tamana bat virus); s) DENV2 backbone with EDE1 epitope ablation (e.g., by substitutions from the amino acid sequence of tamana bat virus); t) DENV2 backbone with core ablation (e.g., by substitutions from the amino acid sequence of tamana bat virus); u) DENV2 backbone with EDE1 epitope and core ablation (e.g., by substitutions from the amino acid sequence of tamana bat virus); v) p) DENV3 backbone with EDE1 epitope ablation (e.g., by substitutions from the amino acid sequence of tamana bat virus); w) DENV3 backbone with core ablation (e.g., by substitutions from the amino acid sequence of tamana bat virus); x) DENV3 backbone with EDE1 epitope and core ablation (e.g., by substitutions from the amino acid sequence of tamana bat virus); y) DENV4 backbone with EDE1 epitope ablation (e.g., by substitutions from the amino acid sequence of tamana bat virus); z) DENV4 backbone with core ablation (e.g., by substitutions from the amino acid sequence of tamana bat virus); and aa) DENV4 backbone with EDE1 epitope and core ablation (e.g., by substitutions from the amino acid sequence of tamana bat virus). Nonlimiting examples of the residues that can be substituted to produce the various null mutant flavivirus E glycoproteins of this invention are provided in Tables 5-9.

[0064] Zika virus is a flavivirus. A nonlimiting example of a Zika virus of this invention includes ZIKV-FP2013 (GenBank Accession No. KJ776791.2), also described as ZIKV H/PF/2013. Another example is ZIKV PRVABC59 (GenBank Accession No. KU01215.1).

[0065] Tamana bat virus (TABV) is a flavivirus that has no known vector and has limited cross-reactivity for antibodies elicited by other flaviviruses. A nonlimiting example of a Tamana bat virus of this invention has the amino acid sequence as provided under GenBank Accession No. NC_003996.

[0066] There are four serotypes of dengue virus (DENV1, DENV2, DENV3 and DENV4). Within each serotype there are a number of different strains or genotypes. The dengue virus antigens and epitopes of the invention can be derived from any dengue virus, including all serotypes, strains and genotypes, now known or later identified. Nonlimiting examples of dengue viruses of this invention include DENV1 (GenBank Accession No. U88535.1), DENV2 (GenBank Accession No. GU289914.1), DENV3 (GenBank Accession No. JQ411814.1), and DENV4 (GenBank Accession No. KJ160504.1).

[0067] In some embodiments of the invention, the dengue virus is UNC1017 strain (DENV-1), West Pacific 74 strain (DENV-1), S16803 strain (DEN2), UNC2005 strain (DENV-2), UNC3001 strain (DENV-3), UNC3043 (DENV-3 strain 059.AP-2 from Philippines, 1984), UNC3009 strain (DENV-3, D2863, Sri Lanka 1989), UNC3066 (DEN3, strain 1342 from Puerto Rico 1977), CH53489 strain (DENV-3), UNC4019 strain (DENV-4), or TVP-360 (DENV-4).

[0068] Nonlimiting examples of other flaviviruses that can be used in this invention include yellow fever virus (YFV) (e.g., GenBank® Database Accession No. JX503529) Japanese encephalitis virus (JEV) (e.g., GenBank® Database Accession No. U14163), West Nile virus (WNV) (e.g., GenBank® Database Accession No. DQ211652), tick-borne encephalitis virus (TBEV) (e.g., GenBank® Database Accession No. P14336) and any other flavivirus now known or later identified. The amino acid sequence of any of these flaviviruses (which is known) can be used a backbone sequence into which amino acid substitutions can be made to introduce an epitope of this invention to produce a chimeric polypeptide of this invention.

[0069] The present invention provides polypeptides (e.g., a chimeric flavivirus E glycoprotein) into which one or more amino acid residues have been substituted in order to introduce a heterologous epitope that induces an immune response to a different flavivirus (I.e., different from the backbone polypeptide). A given amino acid residue in a backbone sequence can be substituted with any amino acid residue (nonlimiting examples of amino acid residues are shown in Table 3).

[0070] Alternatively, the amino acid can be a modified amino acid residue (nonlimiting examples are shown in Table 4) and/or can be an amino acid that is modified by post-translation modification (e.g., acetylation, amidation, formylation, hydroxylation, methylation, phosphorylation or sulfatation).

[0071] The term “flavivirus E ectodomain” refers to all of the amino acid sequence that is outside the virus and does not include portions of the protein that are embedded in the membrane or inside the virus. In the case of dengue virus E ectodomains, there are some helical segments that are outside the virus and loosely associated with the viral membrane, which are typically not included in the soluble protein referred to as the ectodomain. The E ectodomain typically comprises about 400 amino acids, typically numbered as 1 to 400 in the amino acid sequence of the flavivirus E protein.

[0072] The present invention further provides a synthetic backbone comprising an epitope of this invention. As nonlimiting examples, the synthetic backbone can comprise the residues identified in Tables 10-35, which show the amino acid residues in each of the respective amino acid sequences of DENV1, DENV2, DENV3, DENV4 and Zika virus E glycoprotein that comprise an epitope of this invention. In some embodiments, the amino acid residues that make up an epitope of this invention are included in the synthetic backbone in a manner that allows the backbone to assume the appropriate conformation for the epitope to be functional. This approach can be taken to introduce C10 epitope, the C8 epitope, the Z20 epitope, the Z3L1 epitope or both the Z20 and Z3L1 epitopes into a synthetic backbone, in any combination. It would be well understood that the information provided in Tables 10-36 could also be used to construct chimeric E glycoproteins and chimeric flavivirus sequences wherein DENV1, DENV2, DENV3, DENV4 or Zika virus is the backbone sequence and substitutions are made to introduce a heterologous epitope into the backbone sequence. The present invention also provides various screening and diagnostic methods that can employ any of the antibodies, epitopes, polypeptides, virus particles, VLPs and/or compositions of this invention. For example, the present invention provides a method of identifying the presence of a Zika virus neutralizing epitope in a chimeric Zika virus vaccine, comprising contacting the chimeric vaccine with an EDE1 antibody and detecting binding of the EDE1 antibody to the chimeric vaccine, thereby identifying the presence of a Zika virus neutralizing epitope in the chimeric Zika virus vaccine.

[0073] Also provided herein is a method of identifying an immunogenic composition that induces a neutralizing antibody to a Zika virus in a subject, the method comprising: a) contacting a biological sample from a subject that has been administered the immunogenic composition with an epitope that binds an EDE1 antibody; b) determining if the biological sample comprises an antibody that binds the epitope that binds an EDE1 antibody; and c) identifying the immunogenic composition as inducing a neutralizing antibody to a Zika virus in the subject if the biological sample comprises an antibody that binds to the epitope that binds an EDE1 antibody.

[0074] A method is also provided herein of identifying an immunogenic composition that induces a neutralizing antibody to a Zika virus in a subject, the method comprising: a) administering an immunogenic composition comprising a Zika virus antigen to the subject in an amount effective to induce antibodies against the Zika virus antigen; b) contacting a biological sample from the subject with an epitope that binds an EDE1 antibody; c) determining if the biological sample comprises an antibody that binds epitope that binds an EDE1 antibody; and d) identifying the immunogenic composition as inducing a neutralizing antibody to a Zika virus in the subject if the biological sample comprises an antibody that binds to the epitope that binds an EDE1 antibody.

[0075] Further provided herein is a method of identifying a neutralizing antibody to a Zika virus, comprising: a) contacting an antibody with an epitope that binds an EDE1 antibody under conditions whereby formation of an antibody/antigen complex can occur; and c) detecting formation of an antibody/antigen complex, thereby identifying a neutralizing antibody to a Zika virus. Exemplary epitopes that bind an EDE1 antibody are described herein.

[0076] Additionally provided herein is a method of identifying a neutralizing antibody to a Zika virus in a biological sample from a subject, comprising: a) contacting the biological sample comprising an antibody, or suspected of comprising an antibody, with an epitope that binds an EDE1 antibody under conditions whereby formation of an antibody/aritigen complex can occur; and b) detecting formation of an antibody/antigen complex, thereby identifying a neutralizing antibody to a Zika virus in the biological sample.

[0077] A “sample” or biological sample” of this invention can be any sample that can contain an antibody or polypeptide or antigen as described herein. Nonlimiting examples of a biological sample include blood, serum, plasma, saliva, urine, tears, semen, fecal matter, joint fluid, sputum, lavage fluid, cerebrospinal fluid, mucous, cells, tissue, etc.

[0078] As used herein, “5J7” is the term to describe an epitope that is recognized by the monoclonal antibody designated 5J7. Also, “Z20” is the term to describe an epitope that is recognized by the monoclonal antibody designated Z20. Furthermore, “Z3L1” is the term to describe an epitope that is recognized by the monoclonal antibody designated Z3L1.

[0079] It is contemplated that the epitopes of this invention can be formed on a solid substrate. A solid substrate of this invention can be any solid surface to which the amino acid residues that make up the epitope can attach in an orientation that allows for formation of the epitope in a functional conformation, according to the methods described herein. In some embodiments, the solid substrate can be, but is not limited to a plate, resin, dish, slide, well, etc., as would be commonly used in an immunoassay or any other type of assay or reaction.

[0080] In some embodiments of this invention, the solid substrate can be any type of carrier that has a surface to which amino acid residues and/or polypeptides can attach in an orientation that allows for epitope formation according to the methods described herein. In some embodiments, the solid substrate can be a microparticle or nanoparticle.

[0081] Exemplary types of nanoparticles of this invention include but are not limited to, polymer nanoparticles such as PLGA-based, PLA-based, polysaccharide-based (dextran, cyclodextrin, chitosan, heparin), dendrimer, hydrogel; lipid-based nanoparticles such as lipid nanoparticles, lipid hybrid nanoparticles, liposomes, micelles; inorganics-based nanoparticles such as superparamagnetic iron oxide nanoparticles, metal nanoparticles, platin nanoparticles, calcium phosphate nanoparticles, quantum dots; carbon-based nanoparticles such as fullerenes, carbon nanotubes; and protein-based complexes with nanoscales.

[0082] Types of microparticles of this invention include but are not limited to particles with sizes at micrometer scale that are polymer microparticles including but not limited to, PLGA-based, PLA-based, polysaccharide-based (dextran, cyclodextrin, chitosan, heparin), dendrimer, hydrogel; lipid-based microparticles such as lipid microparticles, micelles; inorganics-based microparticles such as superparamagnetic iron oxide microparticles, platin microparticles and the like as are known in the art.

[0083] As used herein, the terms “nanoparticle” and “nanosphere” describe a polymeric particle or sphere in the nanometer size range. The term microparticle” or “microsphere” as used herein describes a particle or sphere in the micrometer size range. Both types of particles or spheres can be used as carriers of this invention.

[0084] A nanoparticle or nanosphere of this invention can have a diameter of 100 nm or less (e.g., in a range from about 1 nm to about 100 nm). In some embodiments, a particle with dimensions more than 100 nm can still be called a nanoparticle. Thus, an upper range for nanoparticles can be about 500 nm. A microparticle or microsphere of this invention can have a diameter of about 0.5 micrometers to about 100 micrometers.

[0085] In some embodiments of a nanoparticle or microparticle of this invention, the dimer or multiplicity of dimers is attached to the exterior surface using hydrophobic noncovalent interaction or covalent linkage based on amine/carboxylate chemistry, thiol/maleimide chemistry, and disulfide chemistry. For hydrophobic noncovalent interaction, unmodified monomer and/or dimer can be directly absorbed on the surface of particles. Alternatively, the monomer or dimer can be first chemically or enzymatically modified by conjugation with a fatty acid (i.e., lauric acid, myristic acid, palmitic acid, stearic acid, arachidic acid, oleic acid, etc.), whose long carbon chain allows for tight and strong hydrophobic interaction with or insertion into the surface of particles. For covalent linkage, the functional groups on the surface of particles are first derivatized or activated to introduce activated ester, activated disulfide, or maleimide, followed by reaction with the monomer and/or dimer of this invention.

[0086] In some embodiments, a particle of this invention can comprise a polymer that can be PLGA-based, PLA-based, and/or polysaccharide-based (dextran, cyclodextrin, chitosan, heparin etc.); a dendrimer; a hydrogel; a lipid base; a lipid hybrid base; a liposome; a micelle; an inorganic base such as, e.g., superparamagnetic iron oxide, metal, platin, calcium phosphate; a quantum dot; a carbon base, such as, e.g., a fullerene, a carbon nanotube; and a protein-based complex with nanoscales.

[0087] In certain embodiments, liposomes may also be employed with the monomers and/or dimers of this invention. The formation and use of liposomes is generally known to those of skill in the art, as summarized below.

[0088] Liposomes are formed from phospholipids that are dispersed in an aqueous medium and spontaneously form multilamellar concentric bilayer vesicles (also termed multilamellar vesicles (MLVs). MLVs generally have diameters of from 25 nm to 4 μm. Sonication of MLVs results in the formation of small unilamellar vesicles (SUVs) with diameters in the range of 200 to 500 Å, containing an aqueous solution in the core.

[0089] Phospholipids can form a variety of structures other than liposomes when dispersed in water, depending on the molar ratio of lipid to water. At low ratios the liposome is the preferred structure. The physical characteristics of liposomes depend on pH, ionic strength and the presence of divalent cations. Liposomes can show low permeability to ionic and polar substances, but at elevated temperatures undergo a phase transition which markedly alters their permeability. The phase transition involves a change from a closely packed, ordered structure, known as the gel state, to a loosely packed, less-ordered structure, known as the fluid state. This occurs at a characteristic phase-transition temperature and results in an increase in permeability to ions, sugars and drugs.

[0090] Liposomes interact with cells via at least four different mechanisms: Endocytosis by phagocytic cells of the reticuloendothelial system such as macrophages and neutrophils; adsorption to the cell surface, either by nonspecific weak hydrophobic or electrostatic forces, or by specific interactions with cell-surface components; fusion with the plasma cell membrane by insertion of the lipid bilayer of the liposome into the plasma membrane, with simultaneous release of liposomal contents into the cytoplasm; and by transfer of liposomal lipids to cellular or subcellular membranes, or vice versa, without any association of the liposome contents. Varying the liposome formulation can alter which mechanism is operative, although more than one may operate at the same time.

[0091] In some embodiments of this invention, the solid substrate can be a nanocapsule. Nanocapsules can generally entrap compounds in a stable and reproducible way. To avoid side effects due to intracellular polymeric overloading, such ultrafine particles (sized around 0.1 μm) should be designed using polymers able to be degraded in vivo. Biodegradable polyalkyl-cyanoacrylate nanoparticles that meet these requirements are contemplated for use in the present invention, and such particles may be are easily made.

[0092] In still further embodiments of the invention, the present invention provides peptide mimitopes (see, Meloen et al. (2000) J. Mol. Recognit. 13, 352-359) that mimic the individual and conformational epitopes of the E glycoproteins of the invention. Mimitopes may be identified using any technique known in the art, such as by surface stimulation, random peptide libraries or phage display libraries, using an antibody or antibodies to the individual and conformational epitopes of the E glycoproteins of the invention.

[0093] The invention further provides a nucleic acid molecule (e.g., isolated nucleic acid) encoding a polypeptide or peptide of this invention. Also provided are vectors (e.g., plasmids, viral vectors, etc.) encoding the nucleic acid molecules of the invention.

[0094] Also provided are cells comprising the polypeptides, peptides, nucleic acid molecules, vectors, virus particles and/or VLPs of this invention.

[0095] In additional embodiments, the present invention provides immunogenic compositions comprising the dimers, vectors, nucleic acid molecules, polypeptides and/or any of the compositions of the invention. In some embodiments, the immunogenic composition can be monovalent. In some embodiments, the immunogenic composition is multivalent (e.g., bivalent, trivalent, tetravalent) for dengue virus serotypes DENV-1, DENV-2, DENV-3 and/or DENV-4 in any combination.

[0096] The present invention further provides a method of producing an immune response to a flavivirus in a subject, comprising administering to the subject an effective amount of a chimeric polypeptide of this invention and/or any of the compositions of this invention, in any combination.

[0097] Furthermore, the present invention provides a method of treating a flavivirus infection in a subject, comprising administering to the subject an effective amount of a chimeric polypeptide of this invention and/or any of the compositions of this invention, in any combination.

[0098] Additionally provided herein is a method of preventing a flavivirus infection in a subject, comprising administering to the subject an effective amount of a chimeric polypeptide of this invention and/or any of the compositions of this invention, in any combination.

[0099] A method is also provided herein, of protecting a subject from the effects of flavivirus infection, comprising administering to the subject an effective amount of a chimeric polypeptide of this invention and/or any of the compositions of this invention, in any combination.

[0100] Further, it is contemplated that the present invention can advantageously be practiced to induce an immune response against one, two, three or all four of DENV-1, DENV-2, DENV-3 and DENV-4 serotypes, in addition to inducing an immune response to Zika virus. It is well-known in the art that effective and safe multivalent dengue vaccines have been a challenge to design because of the problem of interference among serotypes. For example, the immune response may be predominantly directed against only some of the target serotypes. Multiple vaccinations are then required to try to achieve a response against all serotypes; however, in the case of dengue virus, this approach can be dangerous because repeated administrations to a subject with pre-existing antibodies can lead to deleterious effects, such as dengue hemorrhagic fever.

[0101] In embodiments of the invention, an “immunogenically active fragment” of a flavivirus E protein ectodomain comprises, consists essentially of or consists of at least about 200, 275, 300, 325, 350, 375, 380, 390 or 395 amino acids, optionally contiguous amino acids, and/or less than about 400, 410, 420, 430, 440 450 or 451 amino acids, optionally contiguous amino acids, including any combination in between the foregoing as long as the lower limit is less than the upper limit, and the “immunogenically active fragment” induces an immune response (e.g., IgG and/or IgA that react with the native antigen), optionally a protective immune response, against flavivirus in a host and induces the production of antibodies that specifically bind to one or more quaternary flavivirus epitopes as described herein.

[0102] The term “epitope” as used herein means a specific combination of amino acid residues that, when present in the proper conformation, provide a reactive site for an immune response, e.g., involving an antibody (e.g., B cell epitope) and/or T cell receptor (e.g., T cell epitope).

[0103] Portions of a given polypeptide that include a B-cell epitope can be identified using any number of epitope mapping techniques that are known in the art. (See, e.g., Epitope Mapping Protocols in Methods in Molecular Biology, Vol. 66, Glenn E. Morris, Ed., 1996, Humana Press, Totowa, N.J.). For example, linear epitopes can be determined by, e.g., concurrently synthesizing large numbers of peptides on solid supports, the peptides corresponding to portions of the protein molecule, and reacting the peptides with antibodies while the peptides are still attached to the supports. Such techniques are known in the art and described in, e.g., U.S. Pat. No. 4,708,871; Geysen et al. (1984) Proc. Natl. Acad. Sci. USA 81:3998-4002; Geysen et al. (1986) Molec. Immunol. 23:709-715.

[0104] Similarly, conformational epitopes can be readily identified by determining spatial conformation of amino acids such as by, e.g., cryoelectron microscopy, x-ray crystallography and 2-dimensional nuclear magnetic resonance. Antigenic regions of proteins can also be identified using standard antigenicity and hydropathy plots, such as those calculated using, e.g., the Omiga version 1.0 software program available from the Oxford Molecular Group. This computer program employs the Hopp/Woods method (Hopp et al., Proc. Natl. Acad. Sci USA (1981) 78:3824-3828) for determining antigenicity profiles and the Kyte-Doolittle technique (Kyte et al., J. Mol. Biol. (1982) 157:105-132) for hydropathy plots.

[0105] Generally, T-cell epitopes that are involved in stimulating the cellular arm of a subject's immune system are short peptides of about 8-25 amino acids. A common way to identify T-cell epitopes is to use overlapping synthetic peptides and analyze pools of these peptides, or the individual ones, that are recognized by T cells from animals that are immune to the antigen of interest, using, for example, an enzyme-linked immunospot assay (ELISPOT). These overlapping peptides can also be used in other assays such as the stimulation of cytokine release or secretion, or evaluated by constructing major histocompatibility (MHC) tetramers containing the peptide. Such immunogenically active fragments can also be identified based on their ability to stimulate lymphocyte proliferation in response to stimulation by various fragments from the antigen of interest.

[0106] The present invention can be practiced for prophylactic, therapeutic and/or diagnostic purposes. In addition, the invention can be practiced to produce antibodies for any purpose, such as diagnostic or research purposes, or for passive immunization by transfer to another subject.

[0107] The present invention further provides a kit comprising one or more compositions of this invention. It would be well understood by one of ordinary skill in the art that the kit of this invention can comprise one or more containers and/or receptacles to hold the reagents (e.g., antibodies, antigens, nucleic acids) of the kit, along with appropriate buffers and/or diluents and/or other reagent and/or solutions and directions for using the kit, as would be well known in the art. Such kits can further comprise adjuvants and/or other immunostimulatory or immunomodulating agents, as are well known in the art.

[0108] The compositions and kits of the present invention can also include other medicinal agents, pharmaceutical agents, carriers, diluents, immunostimulatory cytokines, etc. Actual methods of preparing such dosage forms are known, or will be apparent, to those skilled in this art.

[0109] Administration to a subject can be by any route known in the art. As non-limiting examples, the route of administration can be by inhalation (e.g., oral and/or nasal inhalation), oral, buccal (e.g., sublingual), rectal, vaginal, topical (including administration to the airways), intraocular, transdermal, by parenteral (e.g., intramuscular [e.g., administration to skeletal muscle], intravenous, intra-arterial, intraperitoneal and the like), subcutaneous (including administration into the footpad), intradermal, intrapleural, intracerebral, and/or intrathecal routes.

[0110] The epitopes, polypeptides and other compositions of the invention can be delivered per se or by delivering a nucleic acid (e.g., DNA) that encodes the same.

[0111] Immunomodulatory compounds, such as immunomodulatory chemokines and cytokines (preferably, CTL inductive cytokines) can be administered concurrently to a subject.

[0112] Cytokines may be administered by any method known in the art. Exogenous cytokines may be administered to the subject, or alternatively, a nucleic acid encoding a cytokine may be delivered to the subject using a suitable vector, and the cytokine produced in vivo. In particular embodiments, a viral adjuvant expresses the cytokine.

[0113] In embodiments of the invention, multiple dosages (e.g., two, three or more) of a composition of the invention can be administered without detectable pathogenicity (e.g., Dengue Shock Syndrome/Dengue Hemorrhagic Fever).

[0114] In some embodiments of the invention, the multivalent vaccines of the invention do not result in immune interference, e.g., a balanced immune response is induced against all antigens presented. In some embodiments of the invention, the balanced response results in protective immunity against Zika virus, DENV-1, DENV-2, DENV-3 and/or DENV-4 in any combination.

[0115] In embodiments of the invention, the multivalent vaccine can be administered to a subject that has anti-dengue maternal antibodies present.

[0116] It should be appreciated that the invention can be embodied in different forms and should not be construed as limited to the embodiments set forth herein. Rather, these embodiments are provided so that this disclosure will be thorough and complete, and will fully convey the scope of the invention to those skilled in the art.

[0117] Unless otherwise defined, all technical and scientific terms used herein have the same meaning as commonly understood by one of ordinary skill in the art to which this invention belongs. The terminology used in the description of the invention herein is for the purpose of describing particular embodiments only and is not intended to be limiting of the invention.

[0118] As used herein, “a,” “an” or “the” can mean one or more than one. For example, “a” cell can mean a single cell or a multiplicity of cells.

[0119] Also as used herein, “and/or” refers to and encompasses any and all possible combinations of one or more of the associated listed items, as well as the lack of combinations when interpreted in the alternative (“or”).

[0120] The term “about,” as used herein when referring to a measurable value such as an amount of dose (e.g., an amount of a fatty acid) and the like, is meant to encompass variations of ±20%, ±10%, ±5%, ±1%, ±0.5%, or even ±0.1% of the specified amount.

[0121] As used herein, the transitional phrase “consisting essentially of” means that the scope of a claim is to be interpreted to encompass the specified materials or steps recited in the claim, “and those that do not materially affect the basic and novel characteristic(s)” of the claimed invention. See, In re Herz, 537 F.2d 549, 551-52, 190 U.S.P.Q. 461, 463 (CCPA 1976) (emphasis in the original); see also MPEP § 2111.03. Thus, the term “consisting essentially of” when used in a claim of this invention is not intended to be interpreted to be equivalent to “comprising.”

[0122] As used herein, the term “nucleic acid” and “nucleic acid molecule” encompasses both RNA and DNA, including cDNA, genomic DNA, synthetic (e.g., chemically synthesized) DNA and chimeras of RNA and DNA. The nucleic acid may be double-stranded or single-stranded. The nucleic acid may be synthesized using nucleotide analogs or derivatives (e.g., inosine or phosphorothioate nucleotides). Such nucleotides can be used, for example, to prepare nucleic acids that have altered base-pairing abilities or increased resistance to nucleases.

[0123] The term “dengue virus E protein domain I and domain II hinge region” and similar terms would be understood in the art to include the three-dimensional interface between domain I and II in the dengue virus E glycoprotein and, optionally, the adjacent amino acid residues. In addition, those skilled in the art will appreciate that certain amino acid residues in the hinge region may facilitate proper folding and presentation of the epitope, even if they do not form part of the epitope per se. In representative embodiments, the dengue virus E protein domain I and domain II hinge region comprises, consists essentially of, or consists of amino acid positions 47-59, 124-133, 199-222 and/or 206-228 of the E protein of dengue virus serotype 3 (DENV-3; e.g., GenBank® Database Accession No. JQ411814) or the corresponding positions of the E protein of other dengue virus serotypes as described herein.

[0124] The term “at least a portion of a dengue virus E protein domain III” and similar terms refer to those portions of E protein domain III that form part of the epitope as well as those amino acid residues that facilitate proper folding and presentation of the epitope, even if they do not form part of the epitope per se. In representative embodiments, the dengue virus E protein domain III comprises, consists essentially of, or consists of amino acid positions 305-308, 323-325, 359-362 and/or 389-390 of the E protein of dengue virus serotype 3 or the corresponding positions of the E protein of other dengue virus serotypes as described herein.

[0125] As used herein, the term “polypeptide” encompasses both peptides and proteins (including fusion proteins), unless indicated otherwise.

[0126] A “fusion protein” is a polypeptide produced when two heterologous nucleotide sequences or fragments thereof coding for two (or more) different polypeptides not found fused together in nature are fused together in the correct translational reading frame.

[0127] A “recombinant” nucleic acid, polynucleotide or nucleotide sequence is one produced by genetic engineering techniques.

[0128] A “recombinant” polypeptide is produced from a recombinant nucleic acid, polypeptide or nucleotide sequence.

[0129] As used herein, an “isolated” polynucleotide (e.g., an “isolated nucleic acid” or an “isolated nucleotide sequence”) means a polynucleotide at least partially separated from at least some of the other components of the naturally occurring organism or virus, for example, the cell or viral structural components or other polypeptides or nucleic acids commonly found associated with the polynucleotide. Optionally, but not necessarily, the “isolated” polynucleotide is present at a greater concentration (i.e., is enriched) as compared with the starting material (e.g., at least about a two-fold, three-fold, four-fold, ten-fold, twenty-fold, fifty-fold, one-hundred-fold, five-hundred-fold, one thousand-fold, ten thousand-fold or greater concentration). In representative embodiments, the isolated polynucleotide is at least about 1%, 5%, 10%, 20%, 30%, 40%, 50%, 60%, 70%, 80%, 90%, 95% or more pure.

[0130] An “isolated” polypeptide means a polypeptide that is at least partially separated from at least some of the other components of the naturally occurring organism or virus, for example, the cell or viral structural components or other polypeptides or nucleic acids commonly found associated with the polypeptide. Optionally, but not necessarily, the “isolated” polypeptide is present at a greater concentration (i.e., is enriched) as compared with the starting material (e.g., at least about a two-fold, three-fold, four-fold, ten-fold, twenty-fold, fifty-fold, one-hundred-fold, five-hundred-fold, one thousand-fold, ten thousand-fold or greater concentration). In representative embodiments, the isolated polypeptide is at least about 1%, 5%, 10%, 20%, 30%, 40%, 50%, 60%, 70%, 80%, 90%, 95% or more pure.

[0131] Furthermore, an “isolated” cell is a cell that has been partially or completely separated from other components with which it is normally associated in nature. For example, an isolated cell can be a cell in culture medium and/or a cell in a pharmaceutically acceptable carrier.

[0132] “Antibody” as used herein refers to an intact immunoglobulin of any isotype, or a fragment thereof that can compete with the intact antibody for specific binding to the target antigen, and includes chimeric, humanized, caninized, equinized, felinized, fully human, fully canine, fully equine, fully feline, and bispecific antibodies. An intact antibody generally will comprise at least two full-length heavy chains and two full-length light chains, but in some instances may include fewer chains such as antibodies naturally occurring in camelids which may comprise only heavy chains Antibodies according to the invention may be derived solely from a single source, or may be “chimeric,” that is, different portions of the antibody may be derived from two different antibodies. For example, the CDR regions may be derived from a rat or murine source, while the framework regions of the V region are derived from a different animal source, such as a human. The antibodies or binding fragments of the invention may be produced in hybridomas, by recombinant DNA techniques, or by enzymatic or chemical cleavage of intact antibodies. Unless otherwise indicated, the term “antibody” includes, in addition to antibodies comprising two full-length heavy chains and two full-length light chains, derivatives, variants, fragments, and muteins thereof, examples of which are described below.

[0133] “Light chain” as used herein includes a full-length light chain and fragments thereof having sufficient variable region sequence to confer binding specificity. A full-length light chain includes a variable region domain, V_{L}, and a constant region domain, C_{L}. The variable region domain of the light chain is at the amino-terminus of the polypeptide. Light chains according to the invention include kappa chains and lambda chains.

[0134] “Heavy chain” includes a full-length heavy chain and fragments thereof having sufficient variable region sequence to confer binding specificity. A full-length heavy chain includes a variable region domain, V_{H}, and three constant region domains, C_{H1}, C_{H2}, and C_{H3}. The V_{H} domain is at the amino-terminus of the polypeptide, and the C_{H} domains are at the carboxyl-terminus, with the C_{H3} being closest to the —COOH end. Heavy chains according to the invention may be of any isotype, including IgG (including IgG1, IgG2, IgG3 and IgG4 subtypes), IgA (including IgA₁ and IgA₂ subtypes), IgM and IgE.

[0135] “Immunologically functional fragment” (or simply “fragment”) of an immunoglobulin chain, as used herein, refers to a portion of an antibody light chain or heavy chain that lacks at least some of the amino acids present in a full-length chain but which is capable of binding specifically to an antigen. Such fragments are biologically active in that they bind specifically to the target antigen and can compete with intact antibodies for specific binding to a given epitope. In one aspect of the invention, such a fragment will retain at least one CDR present in the full-length light or heavy chain, and in some embodiments will comprise a single heavy chain and/or light chain or portion thereof. These biologically active fragments may be produced by recombinant DNA techniques, or may be produced by enzymatic or chemical cleavage of intact antibodies Immunologically functional immunoglobulin fragments of the invention include, but are not limited to, Fab, Fab′, F(ab′)₂, Fv, domain antibodies and single-chain antibodies, and may be derived from any mammalian source, including but not limited to human, mouse, rat, camelid or rabbit. It is contemplated further that a functional portion of the antibodies, for example, one or more CDRs, could be covalently bound to a second protein or to a small molecule to create a therapeutic agent directed to a particular target in the body, possessing bifunctional therapeutic properties, or having a prolonged serum half-life.

[0136] “Fab fragment” as used herein is comprised of one light chain and the CHI and variable regions of one heavy chain. The heavy chain of a Fab molecule cannot form a disulfide bond with another heavy chain molecule.

[0137] “Fc” region as used herein contains two heavy chain fragments comprising the C_{H1} and C_{H2} domains of an antibody. The two heavy chain fragments are held together by two or more disulfide bonds and by hydrophobic interactions of the CH3 domains.

[0138] “Fab′ fragment” contains one light chain and a portion of one heavy chain that contains the V_{H} domain and the C_{H1} domain and also the region between the C_{H1} and C_{H2} domains, such that an interchain disulfide bond can be formed between the two heavy chains of two Fab′ fragments to form a F(ab′)₂ molecule.

[0139] “F(ab′)₂ fragment” contains two light chains and two heavy chains containing a portion of the constant region between the C_{H1} and C_{H2} domains, such that an interchain disulfide bond is formed between the two heavy chains. A F(ab′)₂ fragment thus is composed of two Fab′ fragments that are held together by a disulfide bond between the two heavy chains.

[0140] “Fv region” comprises the variable regions from both the heavy and light chains, but lacks the constant regions.

[0141] “Single-chain antibodies” are Fv molecules in which the heavy and light chain variable regions have been connected by a flexible linker to form a single polypeptide chain, which forms an antigen-binding region. Single chain antibodies are discussed in detail in International Patent Application Publication No. WO 88/01649 and U.S. Pat. Nos. 4,946,778 and 5,260,203, the disclosures of which are incorporated by reference.

[0142] “Domain antibody” as used herein is an immunologically functional immunoglobulin fragment containing only the variable region of a heavy chain or the variable region of a light chain. In some instances, two or more V_{H} regions are covalently joined with a peptide linker to create a bivalent domain antibody. The two V_{H} regions of a bivalent domain antibody may target the same or different antigens.

[0143] “Bivalent antibody” as used herein comprises two antigen binding sites. In some instances, the two binding sites have the same antigen specificities. However, bivalent antibodies may be bispecific (see below).

[0144] “Multispecific antibody” as used herein is one that targets more than one antigen or epitope.

[0145] “Bispecific,” “dual-specific” or “bifunctional” antibody as used herein is a hybrid antibody having two different antigen binding sites. Bispecific antibodies are a species of multispecific antibody and may be produced by a variety of methods including, but not limited to, fusion of hybridomas or linking of Fab′ fragments. See, e.g., Songsivilai & Lachmann (1990) Clin. Exp. Immunol. 79:315-321; Kostelny et al. (1992) J. Immunol. 148:1547-1553. The two binding sites of a bispecific antibody will bind to two different epitopes, which may reside on the same or different protein targets.

[0146] The terms “immunogen” and “antigen” are used interchangeably herein and mean any compound (including polypeptides) to which a cellular and/or humoral immune response can be directed. In particular embodiments, an immunogen or antigen can induce a protective immune response against the effects of flavivirus infection.

[0147] “Effective amount” as used herein refers to an amount of a vector, nucleic acid, epitope, polypeptide, cell, particle, VLP, composition or formulation of the invention that is sufficient to produce a desired effect, which can be a therapeutic and/or beneficial effect. The effective amount will vary with the age, general condition of the subject, the severity of the condition being treated, the particular agent administered, the duration of the treatment, the nature of any concurrent treatment, the pharmaceutically acceptable carrier used, and like factors within the knowledge and expertise of those skilled in the art. As appropriate, an “effective amount” in any individual case can be determined by one of ordinary skill in the art by reference to the pertinent texts and literature and/or by using routine experimentation.

[0148] The term “immunogenic amount” or “effective immunizing dose,” as used herein, unless otherwise indicated, means an amount or dose sufficient to induce an immune response (which can optionally be a protective response) in the treated subject that is greater than the inherent immunity of non-immunized subjects. An immunogenic amount or effective immunizing dose in any particular context can be routinely determined using methods known in the art.

[0149] The terms “vaccine,” “vaccination” and “immunization” are well-understood in the art, and are used interchangeably herein. For example, the terms vaccine, vaccination or immunization can be understood to be a process or composition that increases a subject's immune reaction to an immunogen (e.g., by providing an active immune response), and therefore its ability to resist, overcome and/or recover from infection (i.e., a protective immune response).

[0150] By the terms “treat,” “treating” or “treatment of” (and grammatical variations thereof) it is meant that the severity of the subject's condition is reduced, at least partially improved or ameliorated and/or that some alleviation, mitigation or decrease in at least one clinical symptom is achieved and/or there is a delay in the progression of the disease or disorder. In representative embodiments, the terms “treat,” “treating” or “treatment of” (and grammatical variations thereof) refer to a reduction in the severity of viremia and/or a delay in the progression of viremia, with or without other signs of clinical disease.

[0151] A “treatment effective” amount as used herein is an amount that is sufficient to treat (as defined herein) the subject. Those skilled in the art will appreciate that the therapeutic effects need not be complete or curative, as long as some benefit is provided to the subject.

[0152] The term “prevent,” “preventing” or “prevention of” (and grammatical variations thereof) refer to prevention and/or delay of the onset and/or progression of a disease, disorder and/or a clinical symptom(s) in a subject and/or a reduction in the severity of the onset and/or progression of the disease, disorder and/or clinical symptom(s) relative to what would occur in the absence of the methods of the invention. In representative embodiments, the terms “prevent,” “preventing” or “prevention of” (and grammatical variations thereof) refer to prevention and/or delay of the onset and/or progression of viremia in the subject, with or without other signs of clinical disease. The prevention can be complete, e.g., the total absence of the disease, disorder and/or clinical symptom(s). The prevention can also be partial, such that the occurrence of the disease, disorder and/or clinical symptom(s) in the subject and/or the severity of onset and/or the progression is less than what would occur in the absence of the present invention.

[0153] A “prevention effective” amount as used herein is an amount that is sufficient to prevent (as defined herein) the disease, disorder and/or clinical symptom in the subject. Those skilled in the art will appreciate that the level of prevention need not be complete, as long as some benefit is provided to the subject.

[0154] The efficacy of treating and/or preventing flavivirus infection by the methods of the present invention can be determined by detecting a clinical improvement as indicated by a change in the subject's symptoms and/or clinical parameters (e.g., viremia), as would be well known to one of skill in the art.

[0155] Unless indicated otherwise, the terms “protect,” “protecting,” “protection” and “protective” (and grammatical variations thereof) encompass both methods of preventing and treating flavivirus infection in a subject, whether against one or multiple strains, genotypes or serotypes of a flavivirus such as dengue virus.

[0156] The terms “protective” immune response or “protective” immunity as used herein indicates that the immune response confers some benefit to the subject in that it prevents or reduces the incidence and/or severity and/or duration of disease or any other manifestation of infection. For example, in representative embodiments, a protective immune response or protective immunity results in reduced viremia, whether or not accompanied by clinical disease. Alternatively, a protective immune response or protective immunity may be useful in the therapeutic treatment of existing disease.

[0157] An “active immune response” or “active immunity” is characterized by “participation of host tissues and cells after an encounter with the immunogen. It involves differentiation and proliferation of immunocompetent cells in lymphoreticular tissues, which lead to synthesis of antibody or the development of cell-mediated reactivity, or both.” (Herscowitz, Immunophysiology: Cell Function and Cellular Interactions in Antibody Formation, in IMMUNOLOGY: BASIC PROCESSES 117 (Joseph A. Bellanti ed., 1985)). Alternatively stated, an active immune response is mounted by the host after exposure to immunogens by infection or by vaccination. Active immunity can be contrasted with passive immunity, which is acquired through the “transfer of preformed substances (antibody, transfer factor, thymic graft, interleukin-2) from an actively immunized host to a non-immune host.” Id.

[0158] A “subject” of the invention includes any animal susceptible to flavivirus infection. Such a subject is generally a mammalian subject (e.g., a laboratory animal such as a rat, mouse, guinea pig, rabbit, primates, etc.), a farm or commercial animal (e.g., a cow, horse, goat, donkey, sheep, etc.), or a domestic animal (e.g., cat, dog, ferret, etc.). In particular embodiments, the subject is a primate subject, a non-human primate subject (e.g., a chimpanzee, baboon, monkey, gorilla, etc.) or a human. Subjects of the invention can be a subject known or believed to be at risk of infection by flavivirus. Alternatively, a subject according to the invention can also include a subject not previously known or suspected to be infected by flavivirus or in need of treatment for flavivirus infection.

[0159] Subjects may be treated for any purpose, such as for eliciting a protective immune response, for eliciting a neutralizing response, and/or for eliciting the production of antibodies in that subject, which antibodies can be collected and used for other purposes such as research or diagnostic purposes or for administering to other subjects to produce passive immunity therein, etc.

[0160] Subjects include males and/or females of any age, including neonates, juvenile, mature and geriatric subjects. With respect to human subjects, in representative embodiments, the subject can be an infant (e.g., less than about 12 months, 10 months, 9 months, 8 months, 7 months, 6 months, or younger), a toddler (e.g., at least about 12, 18 or 24 months and/or less than about 36, 30 or 24 months), or a child (e.g., at least about 1, 2, 3, 4 or 5 years of age and/or less than about 14, 12, 10, 8, 7, 6, 5, or 4 years of age). In embodiments of the invention, the subject is a human subject that is from about 0 to 3, 4, 5, 6, 9, 12, 15, 18, 24, 30, 36, 48 or 60 months of age, from about 3 to 6, 9, 12, 15, 18, 24, 30, 36, 48 or 60 months of age, from about 6 to 9, 12, 15, 18, 24, 30, 36, 48 or 60 months of age, from about 9 to 12, 15, 18, 24, 30, 36, 48 or 60 months of age, from about 12 to 18, 24, 36, 48 or 60 months of age, from about 18 to 24, 30, 36, 48 or 60 months of age, or from about 24 to 30, 36, 48 or 60 months of age.

[0161] In embodiments of the invention, the subject has maternal antibodies to a flavivirus of this invention.

[0162] A “subject in need” of the methods of the invention can be a subject known to be, or suspected of being, infected with, or at risk of being infected with, a flavivirus of this invention. A subject of this invention can include a woman of child-bearing age, a pregnant woman, a sex partner, a fetus, etc.

[0163] Pharmaceutical formulations (e.g., immunogenic formulation) comprising the flavivirus epitopes, polypeptides, and/or other compositions of the invention and a pharmaceutically acceptable carrier are also provided, and can be formulated for administration in a pharmaceutical carrier in accordance with known techniques. See, e.g., Remington, The Science And Practice of Pharmacy (latest edition). In the manufacture of a pharmaceutical composition according to embodiments of the present invention, the composition of the invention is typically admixed with inter alia, a pharmaceutically acceptable carrier. By “pharmaceutically acceptable carrier” is meant a carrier that is compatible with other ingredients in the pharmaceutical composition and that is not harmful or deleterious to the subject. The carrier may be a solid or a liquid, or both, and is preferably formulated with the composition of the invention as a unit-dose formulation, for example, a tablet, which may contain from about 0.01 or 0.5% to about 95% or 99% by weight of the composition. The pharmaceutical compositions are prepared by any of the well-known techniques of pharmacy including, but not limited to, admixing the components, optionally including one or more accessory ingredients. In certain embodiments, the pharmaceutically acceptable carrier is sterile and would be deemed suitable for administration into human subjects according to regulatory guidelines for pharmaceutical compositions comprising the carrier.

[0164] Furthermore, a “pharmaceutically acceptable” component such as a salt, carrier, excipient or diluent of a composition according to the present invention is a component that (i) is compatible with the other ingredients of the composition in that it can be combined with the compositions of the present invention without rendering the composition unsuitable for its intended purpose, and (ii) is suitable for use with subjects as provided herein without undue adverse side effects (such as toxicity, irritation, and allergic response). Side effects are “undue” when their risk outweighs the benefit provided by the composition. Non-limiting examples of pharmaceutically acceptable components include any of the standard pharmaceutical carriers such as phosphate buffered saline solutions, water, emulsions such as oil/water emulsion, microemulsions and various types of wetting agents.

[0165] In some embodiments, the compositions of the invention can further comprise one or more than one adjuvant. The adjuvants of the present invention can be in the form of an amino acid sequence, and/or in the form or a nucleic acid encoding an adjuvant. When in the form of a nucleic acid, the adjuvant can be a component of a nucleic acid encoding the polypeptide(s) or fragment(s) or epitope(s) and/or a separate component of the composition comprising the nucleic acid encoding the polypeptide(s) or fragment(s) or epitope(s) of the invention. According to the present invention, the adjuvant can also be an amino acid sequence that is a peptide, a protein fragment or a whole protein that functions as an adjuvant, and/or the adjuvant can be a nucleic acid encoding a peptide, protein fragment or whole protein that functions as an adjuvant. As used herein, “adjuvant” describes a substance, which can be any immunomodulating substance capable of being combined with a composition of the invention to enhance, improve or otherwise modulate an immune response in a subject.

[0166] In further embodiments, the adjuvant can be, but is not limited to, an immunostimulatory cytokine (including, but not limited to, GM/CSF, interleukin-2, interleukin-12, interferon-gamma, interleukin-4, tumor necrosis factor-alpha, interleukin-1, hematopoietic factor flt3L, CD40L, B7.1 co-stimulatory molecules and B7.2 co-stimulatory molecules), SYNTEX adjuvant formulation 1 (SAF-1) composed of 5 percent (wt/vol) squalene (DASF, Parsippany, N.J.), 2.5 percent Pluronic, L121 polymer (Aldrich Chemical, Milwaukee), and 0.2 percent polysorbate (Tween 80, Sigma) in phosphate-buffered saline. Suitable adjuvants also include an aluminum salt such as aluminum hydroxide gel (alum), aluminum phosphate, or algannmulin, but may also be a salt of calcium, iron or zinc, or may be an insoluble suspension of acylated tyrosine, or acylated sugars, cationically or anionically derivatized polysaccharides, or polyphosphazenes.

[0167] Other adjuvants are well known in the art and include without limitation MF 59, LT-K63, LT-R72 (Pal et al., Vaccine 24(6):766-75 (2005)), QS-21, Freund's adjuvant (complete and incomplete), aluminum hydroxide, N-acetyl-muramyl-L-threonyl-D-isoglutamine (thr-MDP), N-acetyl-normuramyl-L-alanyl-D-isoglutamine (CGP 11637, referred to as nor-MDP), N-acetylmuramyl-L-alanyl-D-isoglutaminyl-L-alanine-2-(1′-2′-dipalmitoyl-sn-glycero-3-hydroxyphosphoryloxy)-ethylamine (CGP 19835A, referred to as MTP-PE) and RIBI, which contains three components extracted from bacteria, monophosphoryl lipid A, trealose dimycolate and cell wall skeleton (MPL+TDM+CWS) in 2% squalene/Tween 80 emulsion.

[0168] Additional adjuvants can include, for example, a combination of monophosphoryl lipid A, preferably 3-de-O-acylated monophosphoryl. lipid A (3D-MPL) together with an aluminum salt. An enhanced adjuvant system involves the combination of a monophosphoryl lipid A and a saponin derivative, particularly the combination of QS21 and 3D-MPL as disclosed in PCT publication number WO 94/00153, or a less reactogenic composition where the QS21 is quenched with cholesterol as disclosed in PCT publication number WO 96/33739. A particularly potent adjuvant formulation involving QS21 3D-MPL & tocopherol in an oil in water emulsion is described in PCT publication number WO 95/17210. In addition, the nucleic acid compositions of the invention can include an adjuvant by comprising a nucleotide sequence encoding the antigen and a nucleotide sequence that provides an adjuvant function, such as CpG sequences. Such CpG sequences, or motifs, are well known in the art. In embodiments of the invention, the adjuvant comprises an alphavirus adjuvant as described, for example in U.S. Pat. No. 7,862,829.

[0169] An adjuvant for use with the present invention, such as, for example, an immunostimulatory cytokine, can be administered before, concurrent with, and/or within a few hours, several hours, and/or 1, 2, 3, 4, 5, 6, 7, 8, 9, and/or 10 days before and/or after the administration of a composition of the invention to a subject.

[0170] Furthermore, any combination of adjuvants, such as immunostimulatory cytokines, can be co-administered to the subject before, after and/or concurrent with the administration of an immunogenic composition of the invention. For example, combinations of immunostimulatory cytokines, can consist of two or more immunostimulatory cytokines, such as GM/CSF, interleukin-2, interleukin-12, interferon-gamma, interleukin-4, tumor necrosis factor-alpha, interleukin-1, hematopoietic factor flt3L, CD40L, B7.1 co-stimulatory molecules and B7.2 co-stimulatory molecules. The effectiveness of an adjuvant or combination of adjuvants can be determined by measuring the immune response produced in response to administration of a composition of this invention to a subject with and without the adjuvant or combination of adjuvants, using standard procedures, as described herein and as known in the art.

[0171] Boosting dosages can further be administered over a time course of days, weeks, months or years. In chronic infection, initial high doses followed by boosting doses may be advantageous.

[0172] The pharmaceutical formulations of the invention can optionally comprise other medicinal agents, pharmaceutical agents, stabilizing agents, buffers, carriers, diluents, salts, tonicity adjusting agents, wetting agents, and the like, for example, sodium acetate, sodium lactate, sodium chloride, potassium chloride, calcium chloride, sorbitan monolaurate, triethanolamine oleate, etc.

[0173] For injection, the carrier will typically be a liquid. For other methods of administration, the carrier may be either solid or liquid. For inhalation administration, the carrier will be respirable, and is typically in a solid or liquid particulate form.

[0174] The compositions of the invention can be formulated for administration in a pharmaceutical carrier in accordance with known techniques. See, e.g., Remington, The Science and Practice of Pharmacy (9^{th} Ed. 1995). In the manufacture of a pharmaceutical composition according to the invention, the VLPs are typically admixed with, inter alia, an acceptable carrier. The carrier can be a solid or a liquid, or both, and is optionally formulated with the compound as a unit-dose formulation, for example, a tablet. A variety of pharmaceutically acceptable aqueous carriers can be used, e.g., water, buffered water, 0.9% saline, 0.3% glycine, hyaluronic acid, pyrogen-free water, pyrogen-free phosphate-buffered saline solution, bacteriostatic water, or Cremophor EL[R] (BASF, Parsippany, N.J.), and the like. These compositions can be sterilized by conventional techniques. The formulations of the invention can be prepared by any of the well-known techniques of pharmacy.

[0175] The pharmaceutical formulations can be packaged for use as is, or lyophilized, the lyophilized preparation generally being combined with a sterile aqueous solution prior to administration. The compositions can further be packaged in unit/dose or multi-dose containers, for example, in sealed ampoules and vials.

[0176] The pharmaceutical formulations can be formulated for administration by any method known in the art according to conventional techniques of pharmacy. For example, the compositions can be formulated to be administered intranasally, by inhalation (e.g., oral inhalation), orally, buccally (e.g., sublingually), rectally, vaginally, topically, intrathecally, intraocularly, transdermally, by parenteral administration (e.g., intramuscular [e.g., skeletal muscle], intravenous, subcutaneous, intradermal, intrapleural, intracerebral and intra-arterial, intrathecal), or topically (e.g., to both skin and mucosal surfaces, including airway surfaces).

[0177] For intranasal or inhalation administration, the pharmaceutical formulation can be formulated as an aerosol (this term including both liquid and dry powder aerosols). For example, the pharmaceutical formulation can be provided in a finely divided form along with a surfactant and propellant. Typical percentages of the composition are 0.01-20% by weight, preferably 1-10%. The surfactant is generally nontoxic and soluble in the propellant.

[0178] Representative of such agents are the esters or partial esters of fatty acids containing from 6 to 22 carbon atoms, such as caproic, octanoic, lauric, palmitic, stearic, linoleic, linolenic, olesteric and oleic acids with an aliphatic polyhydric alcohol or its cyclic anhydride. Mixed esters, such as mixed or natural glycerides may be employed. The surfactant may constitute 0.1-20% by weight of the composition, preferably 0.25-5%. The balance of the composition is ordinarily propellant. A carrier can also be included, if desired, as with lecithin for intranasal delivery. Aerosols of liquid particles can be produced by any suitable means, such as with a pressure-driven aerosol nebulizer or an ultrasonic nebulizer, as is known to those of skill in the art. See, e.g., U.S. Pat. No. 4,501,729. Aerosols of solid particles can likewise be produced with any solid particulate medicament aerosol generator, by techniques known in the pharmaceutical art. Intranasal administration can also be by droplet administration to a nasal surface.

[0179] Injectable formulations can be prepared in conventional forms, either as liquid solutions or suspensions, solid forms suitable for solution or suspension in liquid prior to injection, or as emulsions. Alternatively, one can administer the pharmaceutical formulations in a local rather than systemic manner, for example, in a depot or sustained-release formulation.

[0180] Extemporaneous injection solutions and suspensions can be prepared from sterile powders, granules and tablets of the kind previously described. For example, an injectable, stable, sterile formulation of the invention in a unit dosage form in a sealed container can be provided. The formulation can be provided in the form of a lyophilizate, which can be reconstituted with a suitable pharmaceutically acceptable carrier to form a liquid composition suitable for injection into a subject. The unit dosage form can be from about 1 μg to about 10 grams of the formulation. When the formulation is substantially water-insoluble, a sufficient amount of emulsifying agent, which is pharmaceutically acceptable, can be included in sufficient quantity to emulsify the formulation in an aqueous carrier. One such useful emulsifying agent is phosphatidyl choline.

[0181] Pharmaceutical formulations suitable for oral administration can be presented in discrete units, such as capsules, cachets, lozenges, or tables, as a powder or granules; as a solution or a suspension in an aqueous or non-aqueous liquid; or as an oil-in-water or water-in-oil emulsion. Oral delivery can be performed by complexing a compound(s) of the present invention to a carrier capable of withstanding degradation by digestive enzymes in the gut of an animal. Examples of such carriers include plastic capsules or tablets, as known in the art. Such formulations are prepared by any suitable method of pharmacy, which includes the step of bringing into association the protein(s) and a suitable carrier (which may contain one or more accessory ingredients as noted above). In general, the pharmaceutical formulations are prepared by uniformly and intimately admixing the compound(s) with a liquid or finely divided solid carrier, or both, and then, if necessary, shaping the resulting mixture. For example, a tablet can be prepared by compressing or molding a powder or granules, optionally with one or more accessory ingredients. Compressed tablets are prepared by compressing, in a suitable machine, the formulation in a free-flowing form, such as a powder or granules optionally mixed with a binder, lubricant, inert diluent, and/or surface active/dispersing agent(s). Molded tablets are made by molding, in a suitable machine, the powdered protein moistened with an inert liquid binder.

[0182] Pharmaceutical formulations suitable for buccal (sub-lingual) administration include lozenges comprising the compound(s) in a flavored base, usually sucrose and acacia or tragacanth; and pastilles in an inert base such as gelatin and glycerin or sucrose and acacia.

[0183] Pharmaceutical formulations suitable for parenteral administration can comprise sterile aqueous and non-aqueous injection solutions, which preparations are preferably isotonic with the blood of the intended recipient. These preparations can contain anti-oxidants, buffers, bacteriostats and solutes, which render the composition isotonic with the blood of the intended recipient. Aqueous and non-aqueous sterile suspensions, solutions and emulsions can include suspending agents and thickening agents. Examples of nonaqueous solvents are propylene glycol, polyethylene glycol, vegetable oils such as olive oil, and injectable organic esters such as ethyl oleate. Aqueous carriers include water, alcoholic/aqueous solutions, emulsions or suspensions, including saline and buffered media. Parenteral vehicles include sodium chloride solution, Ringer's dextrose, dextrose and sodium chloride, lactated Ringer's, or fixed oils. Intravenous vehicles include fluid and nutrient replenishers, electrolyte replenishers (such as those based on Ringer's dextrose), and the like. Preservatives and other additives may also be present such as, for example, antimicrobials, anti-oxidants, chelating agents, and inert gases and the like.

[0184] Pharmaceutical formulations suitable for rectal administration are optionally presented as unit dose suppositories. These can be prepared by admixing the active agent with one or more conventional solid carriers, such as for example, cocoa butter and then shaping the resulting mixture.

[0185] Pharmaceutical formulations suitable for topical application to the skin preferably take the form of an ointment, cream, lotion, paste, gel, spray, aerosol, or oil. Carriers that can be used include, but are not limited to, petroleum jelly, lanoline, polyethylene glycols, alcohols, transdermal enhancers, and combinations of two or more thereof. In some embodiments, for example, topical delivery can be performed by mixing a pharmaceutical formulation of the present invention with a lipophilic reagent (e.g., DMSO) that is capable of passing into the skin.

[0186] Pharmaceutical formulations suitable for transdermal administration can be in the form of discrete patches adapted to remain in intimate contact with the epidermis of the subject for a prolonged period of time. Formulations suitable for transdermal administration can also be delivered by iontophoresis (see, for example, Pharmaceutical Research 3:318 (1986)) and typically take the form of a buffered aqueous solution of the compound(s). Suitable formulations can comprise citrate or bis\tris buffer (pH 6) or ethanol/water and can contain from 0.1 to 0.2M active ingredient.

[0187] Further, the composition of this invention can be formulated as a liposomal formulation. The lipid layer employed can be of any conventional composition and can either contain cholesterol or can be cholesterol-free. The liposomes that are produced can be reduced in size, for example, through the use of standard sonication and homogenization techniques.

[0188] The liposomal formulations can be lyophilized to produce a lyophilizate which can be reconstituted with a pharmaceutically acceptable carrier, such as water, to regenerate a liposomal suspension.

[0189] The immunogenic formulations of the invention can optionally be sterile, and can further be provided in a closed pathogen-impermeable container.

[0190] The pharmaceutical compositions that are provided can be administered for prophylactic and/or therapeutic treatments. An “effective amount” refers generally to an amount that is a sufficient, but non-toxic, amount of the active ingredient (i.e., an anti-Canine IgE antibody or immunologically functional fragment thereof) to achieve the desired effect, which is a reduction or elimination in the severity and/or frequency of symptoms and/or improvement or remediation of damage. A “therapeutically effective amount” refers to an amount that is sufficient to remedy a disease state or symptoms, or otherwise prevent, hinder, retard or reverse the progression of a disease or any other undesirable symptom. A “prophylactically effective amount” refers to an amount that is effective to prevent, hinder or retard the onset of a disease state or symptom.

[0191] In general, toxicity and therapeutic efficacy of the antibody or fragment or immunogenic composition and/or vaccine of this invention can be determined according to standard pharmaceutical procedures in cell cultures and/or experimental animals, including, for example, determining the LD₅₀ (the dose lethal to 50% of the population) and the ED₅₀ (the dose therapeutically effective in 50% of the population). The dose ratio between toxic and therapeutic effects is the therapeutic index and it can be expressed as the ratio LD₅₀/ED₅₀. Compositions that exhibit large therapeutic indices are preferred.

[0192] The data obtained from cell culture and/or animal studies can be used in formulating a range of dosages for subjects for treatment. The dosage of the active ingredient typically lines within a range of circulating concentrations that include the ED₅₀ with little or no toxicity. The dosage can vary within this range depending upon the dosage form employed and the route of administration utilized.

[0193] The effective amount of a pharmaceutical composition of this invention to be employed therapeutically or prophylactically will depend, for example, upon the therapeutic context and objectives. One skilled in the art will appreciate that the appropriate dosage levels for treatment, according to certain embodiments, will thus vary depending, in part, upon the molecule delivered, the indication for which the anti-composition is being used, the route of administration, and the size (body weight, body surface or organ size) and/or condition (the age and general health) of the subject. A clinician may titer the dosage and modify the route of administration to obtain the optimal therapeutic effect. Typical dosages can range from about 10 or 100 ug/Kg, or 500 or 1 mg/Kg, up to about 50 or 100 mg/Kg subject body weight, or more.

[0194] In some embodiments of the invention, the dosage of a protein (e.g., a composition comprising a polypeptide of this invention or a polypeptide linked to a carrier such as a nanoparticle) can be in a range of about 10° to about 10⁴ micrograms, +/− adjuvant.

[0195] The dosing frequency will depend upon the pharmacokinetic parameters of the composition being administered. For example, a clinician will administer the composition until a dosage is reached that achieves the desired effect. The composition may therefore be administered as a single dose, or as two or more doses (which may or may not contain the same amount of the desired molecule) over time, or as a continuous infusion via an implantation device or catheter. Treatment may be continuous over time or intermittent. Further refinement of the appropriate dosage is routinely made by those of ordinary skill in the art and is within the ambit of tasks routinely performed by them. Appropriate dosages may be ascertained through use of appropriate dose-response data.

[0196] As used herein, the term “antibody” includes intact immunoglobulin molecules as well as fragments thereof that are capable of binding the epitopic determinant of an antigen (i.e., antigenic determinant).

[0197] A neutralizing antibody is an antibody that reacts with an infectious agent (usually a virus) and destroys or inhibits its infectivity and virulence. Neutralization can, in some embodiments, be demonstrated by means of mixing serum with the suspension of infectious agent, and then injecting the mixture into animals or cell cultures that are susceptible to the agent in question. In some embodiments, a neutralizing antibody can be administered to a subject that is infected with the infectious agent (e.g., a virus) to treat the subject by neutralizing the infectious agent and alleviating the deleterious effects of the invention.

[0198] Antibodies that bind the polypeptides of this invention are prepared using intact polypeptides or fragments as the immunizing antigen. The polypeptide or fragment used to immunize a subject can be derived from enzymatic cleavage, recombinant expression, isolation from biological materials, synthesis, etc., and can be conjugated to a carrier protein, if desired. Commonly used carriers that are chemically coupled to peptides and proteins for the production of antibody include, but are not limited to, bovine serum albumin, thyroglobulin and keyhole limpet hemocyanin. The coupled peptide or protein can then used to immunize an animal (e.g., a mouse, rat, or rabbit). The polypeptide or peptide antigens can also be administered with an adjuvant, as described herein and as otherwise known in the art.

[0199] An antibody of this invention can be any type of immunoglobulin, including IgG, IgM, IgA, IgD, and/or IgE. The antibody can be monoclonal or polyclonal and can be of any species of origin, including, for example, mouse, rat, rabbit, horse, goat, sheep or human, or can be a chimeric or humanized antibody (e.g., Walker et al., Molec. Immunol. 26:403-11 (1989)). The antibodies can be recombinant monoclonal antibodies produced according to the methods disclosed in U.S. Pat. No. 4,474,893 or U.S. Pat. No. 4,816,567. The antibodies can also be chemically constructed according to methods disclosed in U.S. Pat. No. 4,676,980. The antibody can further be a single chain antibody (e.g., scFv) or bispecific antibody.

[0200] Antibody fragments included within the scope of the present invention include, for example, Fab, F(ab′)2, and Fc fragments, and the corresponding fragments obtained from antibodies other than IgG. Such fragments can be produced by known techniques. For example, F(ab′)2 fragments can be produced by pepsin digestion of the antibody molecule, and Fab fragments can be generated by reducing the disulfide bridges of the F(ab′)2 fragments. Alternatively, Fab expression libraries can be constructed to allow rapid and easy identification of monoclonal Fab fragments with the desired specificity (Huse et al., (1989) Science 254:1275-1281). Antibodies can also be obtained by phage display techniques known in the art or by immunizing a heterologous host with a cell containing an epitope of interest.

[0201] The polypeptide, fragment or antigenic epitope that is used as an immunogen can be modified or administered in an adjuvant in order to increase antigenicity. Methods of increasing the antigenicity of a protein or peptide are well known in the art and include, but are not limited to, coupling the antigen with a heterologous protein (such as globulin or β-galactosidase) or through the inclusion of an adjuvant during immunization.

[0202] For example, for the production of antibodies, various hosts including goats, rabbits, rats, mice, humans, and others, can be immunized by injection with the polypeptides and/or fragments of this invention, with or without a carrier protein. Additionally, various adjuvants may be used to increase the immunological response. Such adjuvants include, but are not limited to, Freund's complete and incomplete adjuvants, mineral gels such as aluminum hydroxide, and surface-active substances such as lysolecithin, pluronic polyols, polyanions, peptides, oil emulsions, keyhole limpet hemocyanin, and dinitrophenol. Among adjuvants used in humans, BCG (bacilli Calmette-Guerin) and Corynebacterium parvum are especially preferable.

[0203] Monoclonal antibodies can be produced in a hybridoma cell line according to the technique of Kohler and Milstein (Nature 265:495-97 (1975)). Other techniques for the production of monoclonal antibodies include, but are not limited to, the human B-cell hybridoma technique, and the EBV-hybridoma technique (Kozbor et al. 1985. J. Immunol. Methods 81:31-42; Cote et al. 1983. Proc. Natl. Acad. Sci. 80:2026-2030; Cole et al. 1984. Mol. Cell Biol. 62:109-120).

[0204] For example, to produce monoclonal antibodies, a solution containing the appropriate antigen can be injected into a mouse and, after a sufficient time, the mouse sacrificed and spleen cells obtained. The spleen cells are then immortalized by fusing them with myeloma cells or with lymphoma cells, typically in the presence of polyethylene glycol, to produce hybridoma cells. The hybridoma cells are then grown in a suitable medium and the supernatant screened for monoclonal antibodies having the desired specificity. Monoclonal Fab fragments can be produced in a bacterial cell such as E. coli by recombinant techniques known to those skilled in the art (e.g., Huse. Science 246:1275-81 (1989)). Any one of a number of methods well known in the art can be used to identify the hybridoma cell, which produces an antibody with the desired characteristics. These include screening the hybridomas by ELISA assay, Western blot analysis, or radioimmunoassay. Hybridomas secreting the desired antibodies are cloned and the class and subclass are identified using standard procedures known in the art.

[0205] For polyclonal antibodies, antibody-containing serum is isolated from the immunized animal and is screened for the presence of antibodies with the desired specificity using any of the well known procedures as described herein.

[0206] The present invention further provides antibodies of this invention in detectably labeled form. Antibodies can be detectably labeled through the use of radioisotopes, affinity labels (such as biotin, avidin, etc.), enzymatic labels (such as horseradish peroxidase, alkaline phosphatase, etc.) fluorescence labels (such as FITC or rhodamine, etc.), paramagnetic atoms, gold beads, etc. Such labeling procedures are well-known in the art. The labeled antibodies of the present invention can be used for in vitro, in vivo, and in situ assays to identify a polypeptide and/or fragment of this invention in a sample.

[0207] In some embodiments, the present invention further provides the above-described antibodies immobilized on a solid support (e.g., beads, plates, slides or wells formed from materials such as latex or polystyrene). Examples of such solid supports include plastics such as polycarbonate, complex carbohydrates such as agarose and sepharose, acrylic resins and such as polyacrylamide and latex beads. Techniques for coupling antibodies to such solid supports are well known in the art (Weir et al., Handbook of Experimental Immunology 4th Ed., Blackwell Scientific Publications, Oxford, England, Chapter 10 (1986)). Antibodies can likewise be conjugated to detectable groups such as radiolabels (e.g., ³⁵S, ¹²⁵I, ¹³¹I), enzyme labels (e.g., horseradish peroxidase, alkaline phosphatase), and fluorescence labels (e.g., fluorescein) in accordance with known techniques. Determination of the formation of an antibody/antigen complex in the methods of this invention can be by detection of, for example, precipitation, agglutination, flocculation, radioactivity, color development or change, fluorescence, luminescence, etc., as is well known in the art.

[0208] In addition, techniques developed for the production of chimeric antibodies or humanized antibodies by splicing mouse antibody genes to human antibody genes to obtain a molecule with appropriate antigen specificity and biological activity can be used (Morrison et al. 1984. Proc. Natl. Acad. Sci. 81:6851-6855; Neuberger et al. 1984. Nature 312:604-608; Takeda et al. 1985. Nature 314:452-454). Alternatively, techniques described for the production of single chain antibodies can be adapted, using methods known in the art, to produce single chain antibodies specific for the polypeptides and fragments of this invention. Antibodies with related specificity, but of distinct idiotypic composition, can be generated by chain shuffling from random combinatorial immunoglobin libraries (Burton 1991. Proc. Natl. Acad. Sci. 88:11120-3).

[0209] Various immunoassays can be used for screening to identify antibodies having the desired specificity for the proteins and peptides of this invention. Numerous protocols for competitive binding or immunoradiometric assays using either polyclonal or monoclonal antibodies with established specificity are well known in the art. Such immunoassays typically involve the measurement of complex formation between an antigen and its specific antibody (e.g., antigen/antibody complex formation). For example, a two-site, monoclonal-based immunoassay utilizing monoclonal antibodies reactive to two non-interfering epitopes on the proteins or peptides of this invention can be used, as well as a competitive binding assay.

[0210] In certain embodiments, the fragments and/or polypeptides of this invention can be fused with a “carrier” protein or peptide to produce a fusion protein. Such fusion can be carried out, for example, by linking a nucleic acid of this invention in frame with a nucleic acid encoding a carrier protein or fragment thereof of this invention and expressing the linked nucleotide sequence to produce the fusion protein. For example, the carrier protein or peptide can be fused to a polypeptide and/or fragment of this invention to increase the stability thereof (e.g., decrease the turnover rate) in the cell and/or subject. Exemplary carrier proteins include, but are not limited to, glutathione-S-transferase or maltose-binding protein. The carrier protein or peptide can alternatively be a reporter protein. For example, the fusion protein can comprise a polypeptide and/or fragment of this invention and a reporter protein or peptide (e.g., green fluorescence protein (GFP), β-glucoronidase, β-galactosidase, luciferase, and the like) for easy detection of transformed cells and transgene expression. Any suitable carrier protein and/or nucleic acid encoding the carrier protein, as is well known in the art can be used to produce a fusion protein of this invention.

[0211] A variety of protocols for detecting the presence of and/or measuring the amount of polypeptides, fragments and/or peptides of this invention in a sample, using polyclonal and/or monoclonal antibodies specific for the polypeptide, fragment and/or peptide are known in the art. Examples of such protocols include, but are not limited to, enzyme immunoassays (EIA), agglutination assays, immunoblots (Western blot; dot/slot blot, etc.), radioimmunoassays (MA), immunodiffusion assays, chemiluminescence assays, antibody library screens, expression arrays, enzyme-linked immunosorbent assays (ELISA), radioimmunoassays (RIA), immunoprecipitation, Western blotting, competitive binding assays, immunofluorescence, immunohistochemical staining precipitation/flocculation assays and fluorescence-activated cell sorting (FACS). These and other assays are described, among other places, in Hampton et al. (Serological Methods, a Laboratory Manual, APS Press, St Paul, Minn. (1990)) and Maddox et al. (J. Exp. Med. 158:1211-1216 (1993)).

[0212] Furthermore, a number of assays for identification, detection and/or amplification of nucleic acid sequences are well known in the art. For example, various protocols can be employed in the methods of this invention to amplify nucleic acid. As used herein, the term “oligonucleotide-directed amplification procedure” refers to template-dependent processes that result in an increase in the concentration of a specific nucleic acid molecule relative to its initial concentration, or in an increase in the concentration of a detectable signal, such as amplification. As used herein, the term “oligonucleotide directed mutagenesis procedure” is intended to refer to a process that involves the template-dependent extension of a primer molecule. The term “template dependent process” refers to nucleic acid synthesis of a RNA or a DNA molecule wherein the sequence of the newly synthesized strand of nucleic acid is dictated by the well-known rules of complementary base pairing. Typically, vector mediated methodologies involve the introduction of the nucleic acid fragment into a DNA or RNA vector, the clonal amplification of the vector, and the recovery of the amplified nucleic acid fragment. Examples of such methodologies are provided in U.S. Pat. No. 4,237,224 (incorporated herein by reference in its entirety). Nucleic acids, used as a template for amplification methods can be isolated from cells according to standard methodologies (Sambrook et al., 1989). The nucleic acid can be genomic DNA or fractionated or whole cell RNA. Where RNA is used, it may be desired to convert the RNA to a complementary DNA. In one embodiment, the RNA can be whole cell RNA and is used directly as the template for amplification.

[0213] Kits that include an antibody or immunologically functional fragment or immunogenic composition and/or other composition as described herein are also provided. Some kits include such an antibody, fragment, immunogen, vaccine and/or composition in a container (e.g., vial or ampule), and may also include instructions for use of the antibody or fragment, immunogenic composition and/or vaccine in the various methods disclosed above. The antibody, fragment, immunogenic fragment, vaccine or composition can be in various forms, including, for instance, as part of a solution or as a solid (e.g., lyophilized powder). The instructions may include a description of how to prepare (e.g., dissolve or resuspend) the antibody or fragment or immunogenic composition and/or vaccine in an appropriate fluid and/or how to administer the antibody or fragment or immunogenic composition and/or fragment for the treatment and/or prevention of the disorders and/or conditions described.

[0214] The kits may also include various other components, such as buffers, salts, complexing metal ions and other agents described above in the section on pharmaceutical compositions. These components may be included with the antibody or fragment or immunogenic composition and/or vaccine or may be in separate containers. The kits may also include other therapeutic agents for administration with the antibody or fragment or immunogenic composition and/or vaccine. Examples of such agents include, but are not limited to, agents to treat the disorders or conditions as described herein.

[0215] The present invention is more particularly described in the following examples, which are intended as illustrative only since numerous modifications and variations therein will be apparent to those skilled in the art.

### EXAMPLES

### Example 1. Dengue Virus Envelope Dimer Epitope (EDE) Monoclonal Antibodies Isolated from Dengue Patients are Protective Against Zika Virus

[0216] Here we report on the ability of human monoclonal antibodies and immune sera derived from dengue patients to neutralize contemporary epidemic ZIKV strains. We demonstrate that a class of human monoclonal antibodies isolated from DENV patients neutralizes ZIKV in cell culture and is protective in a lethal murine model. We also tested a large panel of convalescent immune sera from humans exposed to primary and repeat DENV infection. Although ZIKV is most closely related DENV compared to other human pathogenic flaviviruses, most DENV immune sera (73%) failed to neutralize ZIKV, while others had low (EC₅₀<100; 18%) or moderate to high levels (EC₅₀>100; 9%) of cross-neutralizing antibodies. Our results establish that ZIKV and DENV share epitopes that are targeted by neutralizing, protective human antibodies. The availability of potently neutralizing human monoclonal antibodies provides an immunotherapeutic approach to control life-threatening ZIKV infection and also points to the possibility of repurposing DENV vaccines to induce cross-protective immunity to ZIKV.

[0217] ZIKV is an emerging arbovirus that has been associated with severe neurological birth defects and fetal loss in pregnant women and Guillian Barré syndrome in adults. Currently, there is no vaccine or therapeutic for ZIKV. The identification of a class of antibodies (EDE1) that potently neutralizes ZIKV in addition to all four DENV serotypes points to a potential immunotherapeutic to combat ZIKV. This is especially salient given the precedence of antibody therapy to treat pregnant women infected with other viruses associated with microcephaly, such as cytomegalovirus and rubella virus. Furthermore, the identification of a functionally conserved epitope between ZIKV and DENV raises the possibility that a vaccine may be able to elicit neutralizing antibodies against both viruses.

[0218] ZIKV is an arbovirus in the Flaviviridae family, which includes important human pathogens such as Japanese encephalitis virus (JEV), West Nile virus (WNV), yellow fever virus (YFV), and dengue viruses 1-4 (DENV 1-4). Flaviviruses are traditionally classified as neurovirulent (WNV, JEV) or hemorrhagic (DENV, YFV). ZIKV infection has historically been characterized by self-limiting febrile illness including mild fever, rash, arthralgia, and conjunctivitis and was not considered to be a pathogen of major public health concern. However, ZIKV caused a large outbreak in Micronesia in 2007, and then throughout Polynesia and the Pacific Islands in 2013-14. In 2015, the first ZIKV outbreak in the Americas was reported in Brazil, where there was no previous evidence of circulation. Since then, 46 countries have reported novel outbreaks and ongoing transmission. Following the onset of the 2015 outbreak, several groups have identified an association between ZIKV infection and fetal malformations including spontaneous abortion, intrauterine growth restriction caused by placental insufficiency, blindness, and a causative link has been associated with microcephaly. The World Health Organization has also reported an increase in Guillian Barré syndrome and meningoencephalitis associated with ZIKV. The underlying molecular mechanisms driving these severe outcomes remain largely unknown.

[0219] The emergence of ZIKV overlaps geographically with DENV-endemic regions, and ZIKV shares approximately 60% sequence identity with DENV. Moreover, multiple dengue vaccine candidates are in phase II and III clinical trials, including a tetravalent vaccine that is currently approved for use in regions where ZIKV is emerging. Thus, a significant portion of the population in ZIKV outbreak areas has DENV reactive antibodies, which has complicated ZIKV diagnostics due to cross-reactivity. Given the extent to which DENV antibodies are present in the population, is it important to evaluate the possibility of cross-protective neutralizing epitopes that could protect against ZIKV infection. By screening a panel of monoclonal antibodies (mAbs), we found that a class of dengue serotype cross-neutralizing mAbs isolated from dengue patients, known as the envelope dimer epitope 1 (EDE1) mAbs, neutralize ZIKV in cell culture and protect from disease in a murine model. A few convalescent immune sera from dengue patients also cross-neutralized ZIKV, further demonstrating the presence conserved epitopes between ZIKV and DENV recognized by human neutralizing antibodies.

[0220] Neutralization of ZIKV by Human, Non-Human Primate, and Mouse mAbs.

[0221] To better understand antibody cross-reactivity and functionality between DENV and ZIKV, we tested a large panel of well-characterized human and mouse mAbs for binding and neutralization of two strains of ZIKV; a French Polynesian 2013 strain representing the Asiastic lineage (H/PF/2013) and a strain circulating in the Americas in 2015 (PRVABC59). As expected, human and non-human primate type-specific mAbs that strongly neutralize DENV-1 (1F4), DENV-2 (2D22), DENV-3 (5J7), and DENV-4 (5H2) did not neutralize ZIKV (FIG. 1, Panel A). DENV cross-reactive mAbs that weakly or moderately neutralized two or more DENV serotypes (4G2, 1N5, and 1M7) also failed to neutralize ZIKV. In stark contrast, the potent DENV cross-neutralizing mAbs EDE1 C8 and EDE1 C10 strongly neutralized ZIKV infection of human monocytic cells expressing DC-SIGN. ZIKV neutralization by EDE1 C8 and ECE1 C10 was confirmed in Vero cells (FIG. 1, Panel B). EDE1 C8 and C10 neutralization of the high passage 1947 Ugandan isolate ZIKV MR766 was also confirmed in Vero cells, with EC₅₀ values of 8.9×10⁻⁴ and 3.4×10⁻⁴ μg/ml, respectively. Interestingly, EDE2 B7, which strongly neutralized all four DENV serotypes, bound but did not neutralize ZIKV (FIG. 1, Panel C). Of note, the contact residues of EDE2 B7 are all part of the EDE1 epitope except for residues 153-157, which were too disordered to resolve structurally when bound to DENV-2 (Table 1).

[0222] To determine if EDE mAbs protect against ZIKV in vivo, a study was performed in type I/II interferon receptor knockout mice, which develop ZIKV-induced morbidity and mortality. The mice were treated with either 10 μg EDE1 C10 or PBS at one day pre-infection and again at nine days post-infection, and challenged with 10² focus forming units of ZIKV H/PF/2013 or PBS in the footpad. The PBS-treated mice experienced 60% mortality following challenge (FIG. 2, Panel A), while the EDE1 C10-protected mice all survived (p<0.05). The EDE1 C10 treated, infected mice largely exhibited no signs of illness, their weight gain is more when compared to mice that were infected with ZIKV and mock antibody, but less than the mice that were not infected (FIG. 2, Panel B).

[0223] Neutralization of ZIKV by Convalescent Dengue Immune Sera.

[0224] People exposed to dengue and other flavivirus infections develop antibodies that change in magnitude and quality over time. The ZIKV cross neutralizing and protective EDE1 C8 and C10 mAbs were derived from plasmablasts collected from individuals a few days after recovery from DENV infections. We tested whether convalescent immune sera collected from DENV patients several years after primary or secondary infection contained antibodies that cross-neutralized ZIKV. We tested a panel of 17 serum samples with neutralization profiles consistent with previous exposure to primary DENV-1 (n=5), DENV-2 (n=4), DENV-3 (n=5) and DENV-4 (n=3) infections for cross-neutralization of ZIKV. (Table 2) Most of the primary sera failed to cross-neutralize ZIKV. In fact, with primary DENV immune sera, we observed lower levels of ZIKV cross-neutralization compared to DENV cross neutralization (FIG. 3 and FIG. 5). Notable exceptions to this trend were two primary DENV-1 immune sera and one primary DENV-4 immune serum that contained moderate to high levels of ZIKV-neutralizing antibodies.

[0225] A hallmark of secondary DENV infections is the induction of dengue serotype cross-neutralizing antibodies which reduce risk of disease from subsequent DENV infections. We tested whether convalescent sera from people exposed to secondary DENV infections years previously also cross-neutralized ZIKV. All of the secondary sera samples tested neutralized DENV-1, DENV-2, and DENV-3, and 15 of 16 samples neutralized DENV-4 (FIG. 4 and FIG. 6). There were no statistically significant differences between the DENV serotypes. In contrast, secondary DENV immune sera usually had low or undetectable levels of ZIKV cross-neutralizing antibodies. Six of the 16 sera (38%) had measurable neutralization titers against ZIKV. Five of these six individuals had modest ZIKV neutralization (EC₅₀ between 1:20 and 1:100), and only one individual had strong ZIKV neutralization (EC₅₀>1:100). Overall, secondary DENV immune sera poorly neutralized ZIKC as compared to cross-neutralization phenotypes noted among other DENV serotypes, and only one individual (6%) strongly cross-neutralized ZIKV

[0226] Antigenic Cartography.

[0227] The fact that convalescent DENV immune human sera displayed low cross neutralization of ZIKV suggests that ZIKV is antigenically distantly related to DENV. To examine the antigenic relationships between ZIKV and DENV, we used antigenic cartography to calculate the Euclidean distances between sera and metric multidimensional scaling was used to render the data in three dimensions. Cartography supports the hypothesis that ZIKV is antigenically more distant from DENV-1-4 than each DENV serotype is to each other. Moreover, ZIKV-neutralizing sera did not have universally higher DENV-neutralizing titers than ZIKV non-neutralizing sera. Indeed, cartography suggests that neutralization titers of primary and secondary sera across all four DENV strains does not predict cross-neutralization outcomes with ZIKV, suggesting that these cross-neutralizing antibodies represent a rare subset of anti-DENV antibodies that develop in a subset of individuals within a population.

[0228] Because ZIKV co-circulates with other flaviviruses, especially the four DENV serotypes, an understanding of the antigenic relationships between ZIKV and other flaviviruses and how these interactions modulate ZIKV replication, disease and transmission is imperative. Among the pathogenic human flaviviruses, ZIKV is most closely related to DENV and the goal of this study was to identify any shared epitopes between DENV and ZIKV targeted by cross protective human antibodies. Primary DENV infections induce serotype specific neutralizing and protective antibody responses, whereas repeat DENV infections lead to the induction serotype cross-neutralizing and cross protective responses. We assessed the long-term immunological cross-reactivity of DENV sera with ZIKV using panels of mAbs and immune sera from people exposed to DENV. Neutralization assays with multiple type-specific and cross-reactive mAbs identified a single set of mAbs in our panel that could neutralize ZIKV and protect against lethal infection in vivo: EDE1 C8 and EDE1 C10. The EDE1 antibodies potently neutralized a French Polynesian 2013 strain representing the Asiastic lineage (H/PF/2013) and, importantly, a strain circulating in the Americas in 2015 (PRVABC59). Indeed, the dose of EDE1 C10 administered to protect in vivo (two doses of 10 μg) is far less than the 500 μg required for the fusion loop-targeting mouse mAb 2A10G6 (32). Thus, it seems likely that these EDE1 mAbs will prove efficacious against multiple ZIKV strains in vivo. Consonant with this hypothesis, an alignment of the EDE1 contact residues on DENV as previously identified by x-ray crystallography and ZIKV reveals considerable conservations among contact residues between all four DENV serotypes and ZIKV, readily explaining the cross-neutralization phenotypes noted in our studies.

[0229] The EDE2 B7 mAb did not neutralize ZIKV despite significant epitope overlap with the EDE1 antibodies. EDE2 B7 is reported to be sensitive to the glycan at position 153 of the DENV envelope protein; ZIKV has a glycan at position 154, but the amino acid insertion in the glycan loop may alter the presentation of the glycan. Moreover, EDE1 antibodies reach further into domains I and III, providing additional structural framework for robust binding that may not be as strongly impacted by the insertion in the glycan loop. These data suggest that the EDE1 epitope may be critical to eliciting antibodies that protect against both DENV and ZIKV, and that efforts to develop vaccines and therapeutics should emphasize this population of antibodies.

[0230] Some, but not all, DENV primary and secondary immune sera is capable of cross-neutralizing ZIKV. The limited cross-neutralization of ZIKV by DENV primary sera is likely attributed to the mostly type specific long-term response that follows a single DENV infection. After secondary infection, DENV-elicited antibody responses are thought to maintain the type-specific response while simultaneously generating more broadly neutralizing antibodies that typically protect from further DENV infection with any serotype (31). Surprisingly, we observed no cross neutralization of ZIKV in many individuals who had broadly cross-neutralizing antibodies to three or more DENV serotypes. We conclude that, despite the close phylogenetic relationship of DENV and ZIKV, durable long-lived antibody immune responses that broadly cross-neutralize DENV serotypes are usually not effective against ZIKV. What we did observe were clear cases of ZIKV cross-neutralization in a minority of subjects with DENV type-specific or cross-neutralizing antibody responses. The molecular basis of why some dengue-immune individuals cross-neutralize ZIKV is currently not known. Possible explanations for cross-neutralization include previous exposure to both DENV and ZIKV or the presence of EDE1 or related antibody classes in a subset of individuals. We propose that EDE1-like antibodies are, at least in part, responsible for cross neutralizing activity in immune sera.

[0231] Gamma globulin treatment of pregnant women infected with rubella virus is associated with a reduction in harmful outcomes in the fetus. Similar therapies have had mixed success in preventing cytomegalovirus-driven birth defects, and immunotherapeutic human monoclonal antibody clinical trials are still ongoing. Thus, it is reasonable to assume that human monoclonal antibody therapy may be a viable treatment option to protect the developing fetus in pregnant women infected with ZIKV. Although additional therapeutic studies are needed, the identification of an epitope that neutralizes ZIKV in vitro and in vivo represents a significant first step toward preventing ZIKV-driven fetal malformation and loss. Furthermore, the fact that the same antibodies targeting EDE1 are able to strongly neutralize both DENV and ZIKV is highly desirable, as diagnostic tests cannot always rapidly and reliably differentiate between the two infections. The strongly cross-neutralizing phenotypes of EDE1 C8 and EDE1 C10 should reduce the likelihood that a DENV patient who has been misdiagnosed with a ZIKV infection would experience disease enhancement after treatment with an EDE1 therapeutic antibody. In some individuals, the EDE1-like antibody may also be elicited by the existing tetravalent dengue vaccines already in late-stage clinical trials or available on the market.

[0232] Cells and Viruses.

[0233] All viruses were propagated in C6/36 Aedes albopictus cells as previously described. C6/36 cells were grown in minimal essential medium (Gibco, Grand Island, N.Y.) at 32° C. Vero-81 cells were grown in Dulbecco's modified Eagle's medium (Gibco, Grand Island, N.Y.) and U937+DC-SIGN cells were maintained in RPMI-1640 (Gibco, Grand Island, N.Y.) at 37° C. All media were supplemented with 10% (Vero-81) or 5% (C6/36 and U937+DC-SIGN) fetal bovine serum (HyClone, Logan, Utah), 0.1 mM nonessential amino acids (Gibco, Grand Island, N.Y.), 100 U/ml penicillin and 100 mg/ml streptomycin (Gibco, Grand Island, N.Y.). U937+DC-SIGN media was additionally supplemented with 2 mM GlutaMAX (Gibco, Grand Island, N.Y.), 10 mM HEPES (Cellgro, Manassas, Va.), and 2-mecaptoethanol (Sigma, St Louis, Mo.). All cells were incubated in the presence of 5% CO₂.

[0234] ZIKV H/PF/2013 viral stocks and ZIKV PRVABC59 viral stocks were obtained. DENV strains used in the polyclonal neutralization panel (DENV-1 WestPac74, DENV-2 S-16803, DENV-3 CH-53489, and DENV-4 TVP-376) were obtained from natural isolates maintained in the laboratory of Dr. Aravinda M. de Silva. DENV strains used in the monoclonal antibody panel (DENV-1 WestPac74, DENV-2 S-16803, DENV-3 UNC3001, and DENV-4 SriLanka 92 Å) were obtained from infectious clones in the laboratory of Dr. Ralph S. Baric.

[0235] Serum and Antibodies.

[0236] Deidentified human DENV immune sera and plasma were collected from individuals with naturally acquired DENV infections confirmed via serology. All donations were collected in compliance with the Institutional Review Board of the University of North Carolina at Chapel Hill (protocol 08-0895). Deidentified human immune sera previously collected from Pediatric Dengue Vaccine Initiative was also used. Monoclonal antibodies were purified from hybridomas (1M7 and 1N5) or synthetically generated by Lake Pharma (Belmont, Calif.) from published sequences (1F4, 2D22, 5J7, 5H2, 4G2, EDE1 C8, EDE1 C10, and EDE2 B7).

[0237] Monoclonal antibodies (mAb) C10, C8, and B7 were synthesized in transfected human HEK293 cells from cloned plasmids (Lake Pharma, Belmont Calif.). Briefly, heavy and light chain variable region sequences (Rouvinski et al. 2015) were cloned into plasmids containing the human IgG1 heavy and the human lambda 2 or kappa light chain constant regions where appropriate. HEK293T cells were transiently co-transfected with both the heavy chain and light chain plasmids, and soluble antibody was collected and protein A purified. The antibody was resuspended in a buffer containing 200 mM HEPES, 100 mM NaCl, 50 mM NaOAc, pH 7.0.

[0238] In Vitro Neutralization.

[0239] Human sera or monoclonal antibodies were serially diluted 3-fold and mixed with sufficient virus to cause 15% infection in U937+DC-SIGN cells. Dilution media contained reduced (2%) fetal bovine serum and was supplemented with 2 mM CaCl₂ and MgCl₂. The virus:antibody mixtures were incubated for 45 minutes in a 96-well plate at 37° C. Following this incubation, 5×10⁴ cells were added and the infection was allowed to proceed for 2 hours at 37° C. The volume of media in each well was increased to 200 μl, and the cells were returned to 37° C. for a total of 24 hours. After 24 hours, the cells were fixed in paraformaldehyde, permeablized, blocked with normal mouse serum in permeabilization buffer, and stained with AlexaFluor 488-conjugated (Molecular Probes, Eugene, Oreg.) 4G2 antibody. Unbound antibody was washed off, and cells were resuspended in Hank's Buffered Salt Solution (Gibco, Grand Island, N.Y.) supplemented with 2% fetal bovine serum. Assays were performed twice and in duplicate. Samples were read on a Guava easyCyte 5HT flow cytometer (Millipore) as previously described by our group (43).

[0240] Neutralization in Vero-81 cells was assessed by serially diluting the monoclonal antibodies 10-fold and mixing with approximately 150 focus forming units of virus. Dilution media contained reduced (2%) fetal bovine serum. The virus:antibody mixtures were incubated for 1 hour in a 96-well plate at 37° C., then transferred to a monolayer of Vero-81 cells in a 96-well plate. Following a further 1 hour incubation at 37° C., the monolayers were overlaid with OptiMEM (Gibco, Grand Island, N.Y.) containing 2% fetal bovine serum and 1% w/v carboxymethylcellulose (Sigma, St Louis, Mo.). Infected plates were incubated for two days at 37° C. with 5% CO₂, at which time they were fixed with paraformaldehyde, permeablized, blocked with normal goat serum (Sigma, St Louis, Mo.) in permeabilization buffer, and stained with 4G2 primary antibody followed by secondary HRP-conjugated anti-mouse IgG (KPL, Gaithersburg, Md.), washed again, and developed with TrueBlue peroxidase substrate (KPL, Gaithersburg, Md.).

[0241] Binding Assays.

[0242] High binding Microlon 600 96-well plates (VWR, Radnor, Pa.) were coated with 100 ng of 4G2 and 2H2 antibody in 0.1M carbonate buffer, pH 9.6, overnight at 4° C. Unbound antibody was rinsed with wash buffer (TBS+0.2% Tween), and wells were coated with blocking buffer (TBS+0.05% Tween) for 1 hour at 37° C. Virus was diluted in blocking buffer at a concentration sufficient to result in approximately equal reactivity with a human cross-reactive control serum and was added to the plate for one hour at 37° C. Unbound virus was rinsed in wash buffer and 1 μg of each primary antibody (or the control serum) diluted in blocking buffer was added to the plate for one hour at 37° C. Unbound primary antibody was rinsed in wash buffer and alkaline phosphatase-conjugated goat anti-human IgG antibody (Sigma, St Louis, Mo.) at 1:2,500 in blocking buffer was added to the plate for one hour at 37° C. Unbound secondary antibody was rinsed in wash buffer, and the plate was developed with SIGMAFAST p-nitrophenyl phosphate tablets (Sigma, St Louis, Mo.) and signal was read at 405 nm.

[0243] Animal Studies.

[0244] Cohorts of five (virus only and virus with antibody) or two (mock) five-week-old type I/II interferon receptor knockout mice (Ifnar^{-/-} and Ifngr^{-/-}) on a C57BL/6 backbone were used in a single experiment. On days −1 and 9 post-infection, mice received either PBS (mock and virus only) or 10 ug EDE1 C10 antibody (virus with antibody) in a 100 ul dose delivered intraperitoneally. On day 0, mice received either PBS (mock) or 100 FFU ZIKV H/PF/2013 (virus only and virus with antibody) in a 10 ul dose delivered subcutaneously in the hind left footpad. Mice were monitored daily for 14 days post-infection for weight loss and signs of illness. Mice were humanely euthanized if they became moribund and counted as deceased for that day. All work was performed in adherence to the NIH Guide for the Care and Use of Laboratory Animals.

[0245] Antigenic Cartography. Antigenic cartography was performed using the EC₅₀ values generated from the neutralization assays with DENV-1, 2, 3, and 4 in U937+DC-SIGN cells. The data was normalized. Euclidean distances between sera were calculated, and metric multidimensional scaling was used to render the data in three dimensions. All calculations and images were generated in R Studio version 0.99.467 (RStudio Inc, Boston, Mass.). Movie files were rendered using Adobe Photoshop software (Adobe, San Jose, Calif.).

[0246] Statistical Analysis.

[0247] When analyzing neutralization assays, antibody and serum concentrations were log₁₀ transformed. Next, the EC₅₀ values were calculated using the sigmoidal dose response (variable slope) equation of Prism 6 (GraphPad software, La Jolla, Calif.). Reported values were required to have: at least 5,000 recorded events per data point (in the case of the U937+DC-SIGN assay), a R squared value of greater than 0.75, a hill slope value of at least 0.7 for monoclonal antibodies and 0.5 for sera, and an EC₅₀ value within the range of the assay. Variation between groups was measured by one-way ANOVA with a Bonferroni post-hoc test. P-values of less than 0.05 were considered statistically significant. Absorbance signals for each virus group in the binding assay were multiplied or divided such that the signal for that virus against the common control serum was set to 1. Each assay was run singly with technical duplicates. Means and standard deviations were calculated in Prism 6 (GraphPad software, La Jolla, Calif.). Survival rates in the animal experiment were analyzed using the Log-rank (Mantel-Cox) test in Prism 6 for Windows (GraphPad software, La Jolla, Calif.). The virus with antibody cohort was compared to the virus only cohort.

### Example 2. Neutralization Mechanism of a Highly Potent Antibody Against Zika Virus

[0248] Zika virus (ZIKV) is a member of the flavivirus genus that includes dengue virus (DENV) and West Nile virus (WNV). ZIKV cryoEM structures show its surface proteins (envelope (E) and membrane (M) proteins) are organized similar to DENV except with a tighter packing, making the virus more thermally stable.

[0249] The virus surface consists of 180 copies of E protein arranged in icosahedral symmetry with 60 asymmetric units. In each asymmetric unit, there are three individual E proteins—molecules A, B and C. The E proteins exist as dimers; three dimers lie parallel to each other forming a raft containing two asymmetric units. There are in total 30 rafts arranged in a herringbone pattern on the virus surface.

[0250] An E protein contains three domains—DI, DII and DIII. It is known for other flaviviruses that DIII contains the receptor binding site and plays an important role in fusion of the virus with the endosomal membrane during cell entry. The tip of DII contains a fusion loop that interacts with the endosomal membrane. DI is the central domain linking DII and DIII together. The DI-DII hinge is highly flexible allowing DII to expose its fusion loop during the fusion event. The DI-DIII hinge was thought to be more rigid but it was observed to change in conformation in the post-fusion E protein trimeric structure. The fusion event is hypothesized to occur in this sequence: (1) virus E protein binds to cell receptors, (2) it is endocytosed, (3) the low pH environment of the endosome causes the E proteins to flip up exposing their fusion loops, allowing them to interact with the endosomal membrane, (4) the E proteins rearrange to trimeric structures, (5) the DIIIs of the E protein trimers change in conformation twisting the trimers leading to the fusion of viral membrane with the endosomal membrane, before the release of the viral genome into cell cytosol.

[0251] The recent explosion of the number of ZIKV cases, together with the association of ZIKV with the development of microcephaly in fetuses and Guillian-Barré syndrome in adults, ignite a pressing need for the development of therapeutics. Currently there are no published human monoclonal antibodies (HMAb) generated against ZIKV. To hasten the process of therapeutics development, DENV HMAbs were rescreened for those that cross-neutralize ZIKV. One group of antibodies has recently been shown to be highly neutralizing to ZIKV—the envelope dimer epitope binding antibodies. Of these HMAbs, C10 is one of the most potent plaque reduction neutralization test (PRNT₅₀=0.024 μgml⁻¹), as demonstrated recently in ZIKV infected cell culture and mouse model. In addition, it can prevent antibody dependent enhancement (ADE) of ZIKV infection in myeloid cells induced by dengue human sera. In this ADE model, the myeloid cells are mostly resistant to direct ZIKV infection, suggesting that its specific receptor is lacking. When sub-neutralizing concentrations of dengue human serum was added to ZIKV, cell infection was enhanced. This is because antibodies, which are attached to ZIKV, bind to the Fc receptor on myeloid cells thus bypassing the need for ZIKV to directly interact with its specific receptor. When HMAb C10 is added to this mixture, it neutralizes the ADE effect. Since HMAb C10 is also an antibody that would likely facilitate attachment to Fc receptor on myeloid cells, it likely neutralizes the virus at a post-attachment step of infection. We investigated the ability of Fab C10 to prevent virus surface protein rearrangement during fusion. We observed Fab C10 is able to lock the entire virus surface at pH6.5, and at pH5.0, the E protein raft thereby preventing structural rearrangement necessary for fusion.

[0252] Effect of Fab C10 on ZIKV Particles at Different pHs.

[0253] We solved the cryoEM structures of Fab C10 complexed with ZIKV at pH8.0, pH6.5 and pH5.0 mimicking the extracellular, early and late endosomal conditions, respectively, and compared them to the cryoEM maps of the uncomplexed ZIKV controls at pH8.0, pH6.5 (FIG. 8) and the two-dimensional (2D)-class average of pH5.0 particles (FIG. 7).

[0254] Micrographs of the uncomplexed ZIKV control at pH8.0 sample show mostly smooth surfaced spherical particles (FIG. 7). In the pH6.5 control sample, some virus particles aggregated, others become deformed, but there are also spherical particles present. 2D class average of the pH6.5 spherical particles (FIG. 7 inset), as well as its low resolution cryoEM map (FIGS. 8a and 8b), show the outer E protein layer has moved to a slightly larger radius compared to the pH8.0 control virus. This suggests that the E protein layer has loosened. Micrographs of the pH5.0 control sample (FIG. 7) show aggregation of some particles, while others appear to be smaller in diameter with hair-like densities protruding from the virus surface. The 2D class average of these small particles (FIG. 7 inset) showed the absence of the E protein compact layer, which was present in the pH8.0 and pH6.5 control samples. This suggests the E proteins are likely ‘flopping’ on the virus surface. The ZIKV controls demonstrate some of the structural transformation stages of the virus particles during fusion, from the compact structure at pH8.0 to a slightly expanded structure at pH6.5 and finally to the E proteins loosening and extending out from the virus lipid membrane at pH5.0.

[0255] Micrographs of the ZIKV-C10 complexes at all pH conditions show spiky looking particles, due to the Fab molecules bound to virus surface (FIG. 7). The 2D class average of the pH6.5 complex particles shows the E protein layer to remain at the same radius as the pH8.0 control (FIG. 7 inset), unlike its pH6.5 ZIKV control. The 2D class average of the pH5.0 complex particles in contrast to its pH5.0 control shows the E protein layer is still present (FIG. 7 inset).

[0256] CryoEM Structures of ZIKV-C10 at Different pHs.

[0257] The cryoEM structures of ZIKV-C10 complex at pH8.0, pH6.5 and pH5.0 are determined to 4.0, 4.4 and 12 Å resolution, respectively. In each of these structures, there are 180 copies of Fab C10 bound to the virus surface. The pH8.0 and pH6.5 complex structures are very similar to each other and their cryoEM maps correlate to 4.5 Å resolution at FSC 0.143 cutoff. Therefore, only the higher resolution pH8.0 complex structure will be described. A comparison of the E proteins of the pH8.0 complex structure with that of the previously solved uncomplexed ZIKV shows that they are largely the same. Only molecule A of the E protein in the asymmetric unit on the pH8.0 complex structure shows clear densities for the ‘150 glycan loop’. The glycan loop changed in conformation when compared to the uncomplexed virus, likely due to its interaction with the Fab molecule (Table 37). This glycan loop on ZIKV is five residues longer than in DENV. The previously solved crystal structure of DENV-C10 did not show densities corresponding to the glycan loop; therefore, it is not known if this region interacts directly with the Fab. However, mutational studies indicate that the residue 153 glycosylation site on DENV is not important for HMAb C10 binding.

[0258] In the 4.0 Å resolution pH8.0 complex cryoEM map, the likely interacting residues that form the epitope were identified, by using a cutoff of 5 Å distance (hydrogen bonds/electrostatic interaction: 4 Å and hydrophobic interactions: 5 Å) between side chains of the Fab and E proteins (Table 37). We also presented the epitope identified with a cutoff of 8 Å distance between the Ca chains of the Fab and E proteins. Each end of the E protein dimer has a Fab molecule attached. The Fabs bind across the E proteins at the intra-dimer interface. The Fab bound near the five-fold vertex end of the A-C′ dimer also likely interacts with residues from the adjacent E protein at the inter-raft interface, whereas the Fab molecule at the other end is also involved in inter-dimer interactions within the raft. The epitopes recognized by the Fab molecules that bind to B-B′ dimer also span across the inter-dimer E protein interfaces. The ability of Fab C10 to bind E proteins at the intra-dimer interface together with the virus quaternary structure-dependent sites—the inter-dimer and inter-raft interfaces, suggests that the entire E protein layer is locked. This is consistent with the cryoEM structure and the 2D class average (FIG. 7 inset) of the ZIKV-C10 complex at pH6.5 showing the E protein layer remains at a similar radius as the uncomplexed ZIKV 018.0 control, unlike its pH6.5 control.

[0259] The ZIKV-C10 complex intra-dimer epitope is located on the DII (at and around the fusion loop) on one E protein and on DIII and DI of the other E protein in the dimer. A plot of electrostatic charges of interacting residues on the E protein intra-dimer epitope and the Fab paratope showed complementary charges. A comparison with the previously published crystal structure of DENV recombinant E protein dimer complexed with Fab C10 shows their epitopes largely overlap. The conserved residues between ZIKV and DENV C10 intra-dimer epitope mainly cluster on DII near the fusion loop. Although a comparison of the C10 intra-dimer epitope to the crystal structures of other EDE antibodies, Fab C8 and A11 complexed with ZIKV recombinant E protein shows overlapping epitopes, the C10 intra-dimer epitope spans a wider area covering larger parts of DI and DIII. Furthermore, our cryoEM structure also shows the interactions of Fab C10 with other virus quaternary structure-dependent epitope at the inter-dimer or inter-raft interfaces which are not observed in the crystal structures. These interactions result in the E proteins on virus surface being locked together and could be critical for its neutralization mechanism.

[0260] A comparison of the cryoEM maps of pH5.0 complex to the pH8.0 complex shows that the E protein layer has moved to a larger radius, whereas the radii of the lipid bilayer membranes are similar. The pH5.0 complex cryoEM map was interpreted by fitting separately the Fab:A-C′ dimer and Fab:B-B′ dimer structures from the pH8.0 complex structure into their respective densities. Comparison of the E proteins in an asymmetric unit of the pH5.0 and pH8.0 complex by superimposing their molecules A shows a slight shift (3.5 Å) between the B′ molecule with respect to the A-C′ dimer. This motion has only slightly changed the distance of the interacting residues on the Fab with that on the E proteins at the inter-dimer interface (Table 38) suggesting the Fab retains its binding capability across this interface at pH5.0 and thus the E proteins within the raft are locked by Fab C10.

[0261] Comparing the pH8.0 and the pH5.0 complex structures shows that the maximum radial movement of the E protein outwards is at one end of the A-C′ dimer near the fivefold vertex (˜15 Å). This suggests the membrane associated stem regions of the E protein need not be fully extended (up to ˜65 Å in length) for this movement. In sharp contrast, a previous study describing a very low resolution cryoEM map of a DIII-binding Fab E16:WNV complex at pH6.0 showed the E protein layer moved radially outwards by ˜60 Å, even though the E protein density was not interpretable. Our pH5.0 complex structure here shows a smaller radial expansion of the E protein layer and therefore may be an even earlier event of fusion process involving the dissociation of the E protein layer from the lipid membrane. Another low resolution cryoEM structure of antibody E104 complexed with DENV was shown to inhibit another stage of the fusion process, possibly the ‘open trimeric E protein conformation’. This is likely a step prior to the formation of the closed trimeric E protein structure.

[0262] Although the E protein raft structure stays mostly intact in the ZIKV-C10 pH5.0 complex structure, the inter-raft interactions are disrupted, even though the Fab C10 in the pH8.0 complex structure forms inter-raft interactions at two sites. A calculation of the E protein electrostatic charges at pH8.0, 6.5 and 5.0 at the intra-dimer, inter-dimer and inter-raft interfaces shows the residues becoming increasingly positively charged with decreasing pH. This suggests that at pH5.0, the E proteins may have the tendencies to repel each other, consistent with the 2D class average of the uncomplexed ZIKV particles at pH5.0, showing that the compact E protein layer is disrupted. This raises a question of why the Fab inter-raft interaction in the pH5.0 complex structure is disrupted, whereas the inter-dimer interaction remains intact. We speculate that the two Fab molecules at the inter-raft interface identified in the pH8.0 complex structure may not form strong enough contacts to resist the large surface area of electrostatic repelling force at this interface. On the other hand, at the inter-dimer interface, the two Fabs in this region could still hold the dimers together, as the surface area of repelling force is much smaller.

[0263] All antibodies can cause ADE at some concentrations. HMAb C10, similar to other potent antibodies, causes ADE at a much narrower range of concentrations compared to the other weakly neutralizing antibodies. To increase the safety of HMAb C10 as a therapeutic antibody, its ability to cause ADE could be eliminated, by mutating its Fc region (LALA mutants) abolishing its interaction with the myeloid cells Fc receptors. Flavivirus such as DENV has been shown to be able to use different receptors to gain entry into different cell types. ZIKV may also behave the same, as it has been shown to bind to DC-SIGN and also TAM receptors. Since different parts of the E proteins interact with different receptors, it is unlikely that any single type of antibody could inhibit virus attachment to all cell types. In addition, ZIKV may also enter by ADE caused by pre-existing DENV antibodies in individuals, thus completely bypassing the need for virus to attach to a specific receptor for infection. However, regardless of how the virus gets into the cell, fusion is a vital step for productive infection. This emphasizes the potential of HMAb C10 as a therapeutic agent, since it can prevent structural rearrangements necessary for virus-endosomal membrane fusion.

[0264] Neutralization Test of HMAb C10 to Zika Virus.

[0265] The neutralization activity of the HMAb C10 on Zika virus strain H/PF/2013 was determined by PRNT. Two-fold serially diluted HMAb C10 starting at 0.5 μgml⁻¹ were incubated with equal volumes of virus at 37° C. for 0.5 h. One hundred microliters of each mixtures were then layered on BHK-21 cells in a 24-well plate and incubated at 37° C. for 1.5 h. The infected cells were washed with phosphate-buffered saline, overlaid with carboxyl-methyl cellulose and incubated at 37° C. for 5 days. Cells were fixed and stained, and the plaques were counted. Percentage neutralization was determined from the comparison of the number of plaques in specific antibody dilutions to the control (without antibody). PRNT₅₀ is the concentration of the antibody that causes 50% reduction in plaque numbers.

[0266] Virus Sample Preparation.

[0267] Aedes albopictus C6/36 cells (ATCC) were grown in RPMI 1640 media supplemented with 2% fetal bovine serum at 29° C. At about 80% confluency, the cells were inoculated with ZIKV strain H/PF/2013 at a multiplicity of infection of 0.5 and incubated at 29° C. for 4 days. The virus-containing media was clarified by centrifugation at 12,000 g for 1 h. Virus was precipitated overnight from the supernatant using 8% (w/v) polyethylene glycol 8000 in NTE buffer (10 mM Tris-HCl pH8.0, 120 mM NaCl and 1 mM EDTA) and the suspension was centrifuged at 14,334 g for 1 h. The resulting pellet containing the virus was resuspended in NTE buffer and then purified through a 24% (w/v) sucrose cushion followed by a linear 10-30% w/v potassium tartrate gradient. The virus band, visualized by its light scattering ability, was extracted, buffer exchanged into NTE buffer and concentrated using a concentrator with 100-kDa molecular weight cut-off filter. All steps of the purification procedure were done at 4° C. The concentrations and purity of the E protein were estimated with Coomassie blue-stained SDS-PAGE using different known concentrations of bovine serum albumin solution as standards.

[0268] Monoclonal Antibody C10 Production.

[0269] Monoclonal antibody (mAb) C10 was synthesized in transfected human cells from cloned plasmids (Lake Pharma, Belmont, Calif., USA). Briefly, previously published heavy and light chain variable region sequences were cloned into plasmids containing the human IgG1 heavy and the human lambda 2 light chain constant regions. HEK293T cells (ATCC) were transiently co-transfected with both the heavy chain and light chain plasmids, and soluble antibody was collected and protein A purified. The antibody was resuspended in a buffer containing 200 mM HEPES, 100 mM NaCl, 50 mM NaOAc, pH7.0.

[0270] Preparation of the C10 Fab Fragments.

[0271] The Fab regions of C10 IgG were produced by papain digestion. Briefly, the whole IgG (8 mg ml⁻¹) was incubated overnight with immobilized papain (Thermo Scientific) at 37° C. After digestion, the Fab fragment was purified with anion exchange chromatography (resource Q, GE Healthcare) and gel filtration (Superdex 200 increase 10/300 GL, GE Healthcare) on an AKTA purifier system.

[0272] CryoEM Sample Preparation.

[0273] The Fab C10 was mixed with ZIKV at a molar ratio of 1.5 Fab to every E protein. The mixture was incubated for 30 min at 37° C. followed by ˜1 h on ice, and then applied to a cryoEM grid (pre-cooled to 4° C.) for 10 s prior to adjusting the pH. The final pH of the virus was reached by addition of a volume ratio of 1.5 μl of 50 mM MES buffer at respective pH (pH5.0 or pH6.5) to every 1 μl of the virus-Fab mixture. The pH-adjusted samples were left on the grid for another 15 s. The grid was then blotted with filter paper and flash frozen in liquid ethane by using the Vitrobot Mark IV plunger (FEI, the Netherlands). The corresponding controls (ZIKV without Fab) for each pH were prepared similarly.

[0274] Cryoelectron Microscopy and Image Processing.

[0275] The images of the frozen ZIKV complexes were taken with the FEI Titan Krios electron microscope, equipped with 300 kV field emission gun, at nominal magnification of 47,000 for pH5.0 Fab C10 ZIKV complex, and 59,000 for pH6.5 and pH8.0 complex samples. A 4096×4096 FEI Falcon II direct electron detector was used to record the images.

[0276] Leginon was used to carry out the data collection. Images for pH8.0 and pH6.5 complexes were collected in movie mode, with total exposure of 1.6 s and total dose 38 e⁻ Å⁻² for pH8.0, total exposure of 1.05 s and total dose of 43 e⁻ Å⁻² for pH6.5 complex. The pH5.0 complex was collected at single image mode, with the dose of 20 e⁻ Å⁻². The frames from each ‘movie’ were aligned using MotionCorr to produce full dose images used for particle selection and orientation search, and images from the first several frames amounting to the dose of about 18 e⁻ Å⁻² to use in 3D reconstruction. The images were taken at underfocus in 0.5˜2.5 mm range. The astigmatic defocus parameters were estimated with Gctf and accounted for in orientation search and 3D reconstruction procedures in MPSA and Relion. In total, 3,257, 2,540 and 2,865 micrographs were collected for Zika-C10 complex at pH8.0, pH6.5 and pH5.0, respectively. The virus-Fab particles were picked with automatic selection tool Gautomatch, run through 2D classification in Relion to produce 2D class averages, broken and classes containing nonviral particles and broken particles were removed, 49,100, 45,867 and 23,810 individual particles in the Fab complex samples which were incubated at pH8.0, pH6.5 and pH5.0, respectively, were selected for further processing. The 3D reconstruction of the pH8.0 and pH6.5 complex structure was done with MPSA, whereas Relion was used for the pH5.0 complex structure. Uncomplexed ZIKV (EMDB ID EMD-8139) was used as the starting model. The gold standard protocol for structure refinement was used for all complexes. The 3D reconstruction procedure produced the complex structures with resolutions of 4.0, 4.4 and 12 Å, for pH8.0, pH6.5 and pH5.0, respectively—using the Fourier shell correlation cutoff of 0.143 for the pH8.0 and pH6.5 cryoEM maps and 0.5 for the pH5.0 cryoEM map.

[0277] Protein Structure Building.

[0278] The pH8.0 and pH6.5 ZIKV-C10 structures were interpreted by fitting in the uncomplexed ZIKV (PDB ID 5IZ7) and Fab C10 (PDB ID 4UT9) first as rigid bodies in Chimera and then finer adjustment were made by using the program Coot. The 12 Å resolution cryoEM map of the ZIKVC10 complex at pH5.0 was interpreted by first fitting in the entire E-protein raft complex with Fab molecules at pH8 structure by using the ‘fit-in-map’ function in Chimera. The individual Fabs complexed with A-C′ and also Fab complexed with B-B′ dimers within a raft were kept as separate rigid bodies groups and their fit into the density were independently optimized by using the ‘fit-in-map’ function in Chimera.

[0279] Electrostatic Potential Calculations.

[0280] Electrostatic potentials of protein surfaces were calculated using Adaptive Poisson-Boltzmann Solver (APBS) and PDB2PQR31 packages. The structures of uncomplexed ZIKV (PDB ID 5IZ7) and the ZIKV complexed with Fab C10 were processed with the PDB2PQR web server (nbcr-222.ucsd.edu/pdb2pqr_2.0.0/) to prepare the PDB files for APBS. A PARSE force field was applied and PROPKA (v3.0) was used to assign pKa values. APBS was then used to calculate the electrostatic properties of the protein surface.

[0281] Data Availability.

[0282] The cryoEM maps and the atomic models of the ZIKV-C10 complex at pH8.0, 6.5 and 5.0 have been deposited in the Electron Microscopy Data Bank (EMD) and the Protein Data Bank (PDB) under the accession codes EMD-9575, EMD-9573, EMD-9574 and 5H37, 5H30, 5H32, respectively. The data that support the findings of this study are available from the corresponding authors on request.

### Example 3. Summary of EDE Null Mutants

[0283] EDE antibodies were first described as a population of antibodies found in some dengue virus (DENV)-infected individuals, which were highly cross-reactive against all four DENV serotypes. Two overlapping by slightly different populations were defined as EDE1 and EDE2.

[0284] EDE1 antibodies, but not necessarily EDE2 antibodies, are able to neutralize Zika virus (ZIKV) and protect against lethal ZIXV challenge in a murine model.

[0285] Rationale for the construction and necessity of EDE Null viruses: Because EDE antibodies are cross-reactive, they are difficult to track. Our group has had success with transplanting epitopes between flaviviruses. These “gain” viruses are being used to track the prevalence of type-specific quaternary epitopes and to develop improved vaccines. Tamana bat virus (TABV) is a no-known-vector flavivirus (it does not replication in invertebrate cells) that is genetically and antigenically distinct from flaviviruses of public health interest (such as DENV and ZIKV).

[0286] By transplanting the TABV version of the EDE epitope into an otherwise EDE-reactive backbone, we can track the loss of antibody binding and neutralization in an EDE-specific manner. The ‘Core and EDE1-specific’ and ‘Core’ constructs can be used to track the overall EDE response. This information can be combined with the ‘EDE1-Specific’ construct to differentiate an EDE1-like response from an EDE2-like response. Structural information regarding the amino acid substitutions that were introduced to produce these constructs is provided in Tables 39-44. Nucleotide sequences of the EDE null mutants of this invention are provided as SEQ ID NOS:90-95 in the Sequence Listing.

[0287] The foregoing is illustrative of the present invention, and is not to be construed as limiting thereof. The invention is defined by the following claims, with equivalents of the claims to be included therein.

[0288] All publications, patent applications, patents, accession numbers and other references cited herein are incorporated by reference in their entireties for the teachings relevant to the sentence and/or paragraph in which the reference is presented.

SEQUENCES

AMINO ACID SEQUENCE OF DENV1 (GENBANK ACCESSION NO. U88535.1) (SEQ ID
NO: 1)
MNNQRKKTGRPSFNMLKRARNRVSTVSQLAKRFSKGLLSGQGPM
KLVMAFIAFLRFLAIPPTAGILARWGSFKKNGAIKVLRGFKKEISNMLNIMNRRKRSV
TMLLMLLPTALAFHLTTRGGEPHMIVSKQERGKSLLFKTSAGVNMCTLIAMDLGELCE
DTMTYKCPRITETEPDDVDCWCNATETWVTYGTCSQTGEHRRDKRSVALAPHVGLGLE
TRTETWMSSEGAWKQIQKVETWALRHPGFTVIALFLAHAIGTSITQKGIIFILLMLVT
PSMAMRCVGIGNRDFVEGLSGATWVDVVLEHGSCVTTMAKDKPTLDIELLKTEVTNPA
VLRKLCIEAKISNTTTDSRCPTQGEATLVEEQDTNFVCRRTFVDRGWGNGCGLFGKGS
LITCAKFKCVTKLEGKIVQYENLKYSVIVTVHTGDQHQVGNETTEHGTTATITPQAPT
SEIQLTDYGALTLDCSPRTGLDFNEMVLLTMEKKSWLVHKQWFLDLPLPWTSGASTSQ
ETWNRQDLLVTFKTAHAKKQEVVVLGSQEGAMHTALTGATEIQTSGTTTIFAGHLKCR
LKMDKLTLKGMSYVMCTGSFKLEKEVAETQHGTVLVQVKYEGTDAPCKIPFSSQDEKG
VTQNGRLITANPIVTDKEKPVNIEAEPPFGESYIVVGAGEKALKLSWFKKGSSIGKMF
EATARGARRMAILGDTAWDFGSIGGVFTSVGKLIHQIFGTAYGVLFSGVSWTMKIGIG
ILLTWLGLNSRSTSLSMTCIAVGMVTLYLGVMVQADSGCVINWKGRELKCGSGIFVTN
EVHTWTEQYKFQADSPKRLSAAIGKAWEEGVCGIRSATRLENIMWKQISNELNHILLE
NDMKFTVVVGDVSGILAQGKKMIRPQPMEHKYSWKSWGKAKIIGADVQNTTFIIDGPN
TPECPDNQRAWNIWEVEDYGFGIFTTNIWLKLRDSYTQVCDHRLMSAAIKDSKAVHAD
MGYWIESEKNETWKLARASFIEVKTCIWPKSHTLWSNGVLESEMIIPKIYGGPISQHN
YRPGYFTQTAGPWHLGKLELDFDLCEGTTVVVDEHCGNRGPSLRTTTVTGKTIHEWCC
RSCTLPPLRFKGEDGCWYGMEIRPVKEKEENLVKSMVSAGSGEVDSFSLGLLCISIMI
EEVMRSRWSRKMLMTGTLAVFLLLTMGQLTWNDLIRLCIMVGANASDKMGMGTTYLAL
MATFRMRPMFAVGLLFRRLTSREVLLLTVGLSLVASVELPNSLEELGDGLAMGIMMLK
LLTDFQSHQLWATLLSLTFVKTTFSLHYAWKTMAMILSIVSLFPLCLSTTSQKTTWLP
VLLGSLGCKPLTMFLITENKIWGRKSWPLNEGIMAVGIVSILLSSLLKNDVPLAGPLI
AGGMLIACYVISGSSADLSLEKAAEVSWEEEAEHSGASHNILVEVQDDGTMKIKDEER
DDTLTILLKATLLAISGVYPMSIPATLFVWYFWQKKKQRSGVLWDTPSPPEVERAVLD
DGIYRILQRGLLGRSQVGVGVFQEGVFHTMWHVTRGAVLMYQGKRLEPSWASVKKDLI
SYGGGWRFQGSWNAGEEVQVIAVEPGKNPKNVQTAPGTFKTPEGEVGAIALDFKPGTS
GSPIVNREGKIVGLYGNGVVTTSGTYVSAIAQAKASQEGPLPEIEDEVFRKRNLTIMD
LHPGSGKTRRYLPAIVREAIRRNVRTLVLAPTRVVASEMAEALKGMPIRYQTTAVKSE
HTGKEIVDLMCHATFTMRLLSPVRVPNYNMIIMDEAHFTDPASIAARGYISTRVGMGE
AAAIFMTATPPGSVEAFPQSNAVIQDEERDIPERSWNSGYDWITDFPGKTVWFVPSIK
SGNDIANCLRKNGKRVVQLSRKTFDTEYQKTKNNDWDYVVTTDISEMGANFRADRVID
PRRCLKPVILKDGPERVILAGPMPVTVASAAQRRGRIGRNQNKEGDQYIYMGQPLNND
EDHAHWTEAKMLLDNINTPEGIIPALFEPEREKSAAIDGEYRLRGEARKTFVELMRRG
DLPVWLSYKVASEGFQYSDRRWCFDGERNNQVLEENMDVEIWTKEGERKKLRPRWLDA
RTYSDPLALREFKEFAAGRRSVSGDLILEIGKLPQHLTQRAQNALDNLVMLHNSEQGG
KAYRHAMEELPDTIETLMLLALIAVLTGGVTLFFLSGRGLGKTSIGLLCVIASSALLW
MASVEPHWIAASIILEFFLMVLLIPEPDRQRTPQDNQLAYVVIGLLFMILTAAANEMG
LLETTKKDLGIGHAAAENHHHAAMLDVDLHPASAWTLYAVATTIITPMMRHTIENTTA
NISLTAIANQAAILMGLDKGWPISKMDIGVPLLALGCYSQVNPLTLTAAVFMLVAHYA
IIGPGLQAKATREAQKRTAAGIMKNPTVDGIVAIDLDPVVYDAKFEKQLGQIMLLILC
TSQILLMRTTWALCESITLATGPLTTLWEGSPGKFWNTTIAVSMANIFRGSYLAGAGL
AFSLMKSLGGGRRGTGAQGETLGEKWKRQLNQLSKSEFNTYKRSGIIEVDRSEAKEGL
KRGEPTKHAVSRGTAKLRWFVERNLVKPEGKVIDLGCGRGGWSYYCAGLKKVTEVKGY
TKGGPGHEEPIPMATYGWNLVKLYSGKDVFFTPPEKCDTLLCDIGESSPNPTIEEGRT
LRVLKMVEPWLRGNQFCIKILNPYMPSVVETLEQMQRKHGGMLVRNPLSRNSTHEMYW
VSCGTGNIVSAVNMTSRMLLNRFTMAHRKPTYERDVDLGAGTRHVAVEPEVANLDIIG
QRIENIKNGHKSTWHYDEDNPYKTWAYHGSYEVKPSGSASSMVNGVVRLLTKPWDVIP
MVTQIAMTDTTPFGQQRVFKEKVDTRTPKAKRGTAQIMEVTARWLWGFLSRNKKPRIC
TREEFTRKVRSNAAIGAVFVDENQWNSAKEAVEDERFWDLVHRERELHKQGKCATCVY
NMMGKREKKLGEFGKAKGSRAIWYMWLGARFLEFEALGFMNEDHWFSRENSLSGVEGE
GLHKLGYILRDISKIPGGNMYADDTAGWDTRITEDDLQNEAKITDIMEPEHALLATSI
FKLTYQNKVVRVQRPAKNGTVMDVISRRDQRGSGQVGTYGLNTFTNMEAQLIRQMESE
GIFSPSELETPNLAERVLDWLKKHGTERLKRMAISGDDCVVKPIDDRFATALTALNDM
GKVRKDIPQWEPSKGWNDWQQVPFCSHHFHQLIMKDGREIVVPCRNQDELVGRARVSQ
GAGWSLRETACLGKSYAQMWQLMYFHRRDLRLAANAICSAVPVDWVPTSRTTWSIHAH
HQWMTTEDMLSVWNRVWIEENPWMEDKTHVSSWEDVPYLGKREDRWCGSLIGLTARAT
WATNIQVAINQVRRLIGNENYLDFMTSMKRFKNESDPEGALW
AMINO ACID SEQUENCE OF DENV2 GENBANK ACCESSION NO. GU289914.1 (SEQ ID NO: 2)
MNNQRKKARNTPFNMLKRERNRVSTVQQLTKRFSLGMLQGRGPL
KLFMALVAFLRFLTIPPTAGILKRWGTIKKSKAINVLRGFRKEIGRMLNILNRRRRSA
GMIIMLIPTVMAFELTTRNGEPHMIVSRQEKGKSLLFKTEDGVNMCTLMAMDLGELCE
DTITYNCPLLRQNEPEDIDCWCNSTSTWVTYGTCTTTGEHRREKRSVALVPHVGMGLE
TRTETWMSSEGAWKHAQRIETWILRHPGFTIMAAILAYTIGTTHFQRALIFILLTAVA
PSMTMRCIGISNRDFVEGVSGGSWVDIVLEHGSCVTTMAKNKPTLDFELIKTEAKQPA
TLRKYCIEAKLTNTTTESRCPTQGEPSLNEEQDKRFVCKHSMVDRGWGNGCGLFGKGG
IVTCAMFTCKKNMEGKVVQPENLEYTIVVTPHSGEEHAVGNDTGKHGKEIKVTPQSSI
TEAELTGYGTVTMECSPRTGLDFNEMVLLQMENKAWLVHRQWFLDLPLPWLPGADTQG
SNWIQKETLVTFKNPHAKKQDVVVLGSQEGAMHTALTGATEIQMSSGNLLFTGHLKCR
LRMDKLQLKGMSYSMCTGKFKVVKEIAETQHGTIVIRVQYEGDGSPCKIPFEIMDLEK
RHVLGRLITVNPIVTEKDSPVNIEAEPPFGDSYIIIGVDPGQLKLNWFKKGSSIGQMF
ETTMRGAKRMAILGDTAWDFGSLGGVFTSIGKALHQVFGAIYGAAFSGVSWTMKILIG
VIITWIGMNSRSTSLSVSLVLVGIVTLYLGVMVQADSGCVVSWKNKELKCGSGIFITD
NVHTWTEQYKFQPESPSKLASAIQKAQEEGICGIRSVTRLENLMWKQITPELNHILAE
NEVKLTIMTGDIKGIMQAGKRSLRPQPTELKYSWKTWGKAKMLSTESHNQTFLIDGPE
TAECPNTNRAWNSLEVEDYGFGVFTTNIWLKLKEKQDAFCDSKLMSAAIKDNRAVHAD
MGYWIESALNDTWKIEKASFIEVKNCHWPKSHTLWSNGVLESEMIIPKNLAGPVSQHN
YRPGYHTQIAGPWHLGKLEMDFDFCDGTTVVVTEDCGNRGPSLRTTTASGKLITEWCC
RSCTLPPLRYRGEDGCWYGMEIRPLKEKEENLVNSLVTAGHGQVDNFSLGVLGMALFL
EEMLRTRVGTKHAILLVAVSFVTLITGNMSFRDLGRVVVMVGATMTDDIGMGVTYLAL
LAAFKVRPTFAAGLLLRKLTSKELMMTTIGIVLLSQSTIPETILELTDALALGMMVLK
MVRNMEKYQLAVTIMAILCVPNAVILQNAWKVSCTILAVVSVSPLLLTSSQQKTDWIP
LALTIKGLNPTAIFLTTLSRTSKKRSWPLNEAIMAVGMVSILASSLLKNDIPMTGPLV
AGGLLTVCYVLTGRSADLELERAADVKWEDQAEISGSSPILSITISEDGSMSIKNEEE
EQTLTILIRTGLLVISGLFPVSIPITAAAWYLWEVKKQRAGVLWDVPSPPPMGKAELE
DGAYRIKQKGILGYSQIGAGVYKEGTFHTMWHVTRGAVLMHKGKRIEPSWADVKKDLI
SYGGGWKLEGEWKEGEEVQVLALEPGKNPRAVQTKPGLFRTNAGTIGAVSLDFSPGTS
GSPIIDKKGKVVGLYGNGVVTRSGAYVSAIAQTEKSIEDNPEIEDDIFRKRRLTIMDL
HPGAGKTKRYLPAIVREAIKRGLRTLILAPTRVVAAEMEEALRGLPIRYQTPAIRAEH
TGREIVDLMCHATFTMRLLSPVRVPNYNLIIMDEAHFTDPASIAARGYISTRVEMGEA
AGIFMTATPPGSRDPFPQSNAPIIDEEREIPERSWNSGHEWVTDFKGKTVWFVPSIKA
GNDIAACLRKNGKKVIQLSRKTFDSEYVKTRTNDWDFVVTTDISEMGANFKAERVIDP
RRCMKPVILTDGEERVILAGPMPVTHSSAAQRRGRIGRNPKNENDQYIYMGEPLENDE
DCAHWKEAKMLLDNINTPEGIIPSMFEPEREKVDAIDGEYRLRGEARKTFVDLMRRGD
LPVWLAYKVAAEGINYADRRWCFDGIKNNQILEENVEVEIWTKEGERKKLKPRWLDAR
IYSDPLALKEFKEFAAGRKSLTLNLITEMGRLPTFMTQKARDALDNLAVLHTAEAGGR
AYNHALSELPETLETLLLLTLLATVTGGIFLFLMSGRGIGKMTLGMCCIITASILLWY
AQIQPHWIAASIILEFFLIVLLIPEPEKQRTPQDNQLTYVVIAILTVVAATMANEMGF
LEKTKKDLGLGSIATQQPESNILDIDLRPASAWTLYAVATTFVTPMLRHSIENSSVNV
SLTAIANQATVLMGLGKGWPLSKMDIGVPLLAIGCYSQVNPITLTAALLLLVAHYAII
GPGLQAKATREAQKRAAAGIMKNPTVDGITVIDLDPIPYDPKFEKQLGQVMLLVLCVT
QVLMMRTTWALCEALTLATGPISTLWEGNPGRFWNTTIAVSMANIFRGSYLAGAGLLF
SIMKNTTNTRRGTGNIGETLGEKWKSRLNALGKSEFQIYKKSGIQEVDRTLAKEGIKR
GETDHHAVSRGSAKLRWFVERNMVTPEGKVVDLGCGRGGWSYYCGGLKNVREVKGLTK
GGPGHEEPIPMSTYGWNLVRLQSGVDVFFIPPEKCDTLLCDIGESSPNPTVEAGRTLR
VLNLVENWLNNNTQFCIKVLNPYMPSVIEKMETLQRKYGGALVRNPLSRNSTHEMYWV
SNASGNIVSSVNMISRMLINRFTMRHKKATYEPDVDLGSGTRNIGIESEIPNLDIIGK
RIEKIKQEHETSWHYDQDHPYKTWAYHGSYETKQTGSASSMVNGVVRLLTKPWDVVPM
VTQMAMTDTTPFGQQRVFKEKVDTRTQEPKEGTKKLMKITAEWLWKELGKKKTPRMCT
REEFTRKVRSNAALGAIFTDENKWKSAREAVEDSRFWELVDKERNLHLEGKCETCVYN
MMGKREKKLGEFGKAKGSRAIWYMWLGARFLEFEALGELNEDHWFSRENSLSGVEGEG
LHKLGYILRDVSKKEGGAMYADDTAGWDTRITLEDLKNEEMVTNHMEGEHKKLAEAIF
KLTYQNKVVRVQRPTPRGTVMDIISRRDQRGSGQVGTYGLNTFTNMEAQLIRQMEGEG
VFKNIQHLTVTEETAVQNWLARVGRERLSRMAISGDDCVVKPLDDRFASALTALNDMG
KIRKDIQQWEPSRGWNDWTQVPFCSHHFHELIMKDGRVLVVPCRNQDELIGRARISQG
AGWSLRETACLGKSYAQMWSLMYFHRRDLRLAANAICSAVPSHWVPTSRTTWSIHAKH
EWMTTEDMLTVWNRVWIQENPWMEDKTPVESWEEIPYLGKREDQWCGSLIGLTSRATW
AKNIQAAINQVRSLIGNEEYTDYMPSMKRFRREEEEAGVLW
AMINO ACID SEQUENCE OF DENV3 GENBANK ACCESSION NO. JQ411814.1 (SEQ
ID NO: 3)
MNNQRKKTGKPSINMLKRVRNRVSTGPQLAKRFSKGLLNGQGPM
KLVMAFIAFLRFLAIPPTAGVLARWGTFKKSGAIKVLKGFKKEISNMLSIINKRKKTS
LCLMMILPAALAFHLTSRDGEPRMIVGKNERGKSLLFKTASGINMCTLIAMDLGEMCD
DTVTYKCPHITEVEPEDIDCWCNLTSTWVTYGTCNQAGEHRRDKRSVALAPHVGMGLD
TRTQTWMSAEGAWRQVEKVETWALRHPGFTILALFLAHYIGTSLTQKVVIFILLMLVT
PSMTMRCVGIGNRDFVEGLSGATWVDVVLEHGGCVTTMAKNKPTLDIELQKTEATQLA
TLRKLCIEGKITNITTDSRCPTQGEAVLPEEQDQNYVCKHTYVDRGWGNGCGLFGKGS
LVTCAKFQCLEPIEGKVVQYENLKYTVIITVHTGDQHQVGNETQGVTAEITPQASTTE
AILPEYGTLGLECSPRTGLDFNEMILLTMKNKAWMVHRQWFFDLPLPWTSGATTETPT
WNRKELLVTFKNAHAKKQEVVVLGSQEGAMHTALTGATEIQNSGGTSIFAGHLKCRLK
MDKLELKGMSYAMCTNTFVLKKEVSETQHGTILIKVEYKGEDAPCKIPFSTEDGQGKA
HNGRLITANPVVTKKEEPVNIEAEPPFGESNIVIGIGDNALKINWYKKGSSIGKMFEA
TARGARRMAILGDTAWDFGSVGGVLNSLGKMVHQIFGSAYTALFSGVSWVMKIGIGVL
LTWIGLNSKNTSMSFSCTATGIITLYLGAVVQADMGCVINWKGKELKCGSGIFVTNEV
HTWTEQYKFQADSPKRLATAIAGAWENGVCGIRSTTRMENLLWKQIANELNYILWENN
IKLTVVVGDTIGVLEQGKRTLTPQPMELKYSWKTWGKAKIVTAETQNSSFIIDGPNTP
ECPSASRAWNVWEVEDYGFGVFTTNIWLKLRDVYTQLCDHRLMSAAVKDERAVHADMG
YWIESQKNGSWKLEKASLIEVKTCTWPKSHTLWSNGVLESDMIIPKSLAGPISQHNYR
PGYHTQTAGPWHLGKLELDFNYCEGTTVVITENCGTRGPSLRTTTVSGKLIHEWCCRS
CTLPPLRYMGEDGCWYGMEIRPISEKEENMVKSLVSAGSGKVDNFTMGVLCLAILFEE
VMRGKFGKKHMIAGVLFTFVLLLSGQITWRDMAHTLIMIGSNASDRMGMGVTYLALIA
TFKIQPFLALGFFLRKLTSRENLLLGVGLAMATTLQLPEDIEQMANGIALGLMALKLI
TQFETYQLWTALVSLTCSNTILTLTVAWRTATLILAGVSLLPVCQSSSMRKTDWLPMT
VAAMGVPPLPLFIFSLKDTLKRRSWPLNEGVMAVGLVSILASSLLRNDVPMAGPLVAG
GLLIACYVITGTSADLTVEKAADVTWEEEAEQTGVSHNLMITVDDDGTMRIKDDETEN
ILTVLLKTALLIVSGIFPYSIPATLLVWHTWQKQTQRSGVLWDVPSPPETQKAELEEG
VYRIKQQGILGKTQVGVGVQKEGVFHTMWHVTRGAVLTHNGKRLEPNWASVKKDLISY
GGGWRLSAQWQKGEEVQVIAVEPGKNPKNFQTMPGTFQTTTGEIGAIALDFKPGTSGS
PIINREGKVVGLYGNGVVTKNGGYVSGIAQTNAEPDGPTPELEEEMFKKRNLTIMDLH
PGSGKTRKYLPAIVREAIKRRLRTLILAPTRVVAAEMEEALKGLPIRYQTTATKSEHT
GREIVDLMCHATFTMRLLSPVRVPNYNLIIMDEAHFTDPASIAARGYISTRVGMGEAA
AIFMTATPPGTADAFPQSNAPIQDEERDIPERSWNSGNEWITDFAGKTVWFVPSIKAG
NDIANCLRKNGKKVIQLSRKTFDTEYQKTKLNDWDFVVTTDISEMGANFKADRVIDPR
RCLKPVILTDGPERVILAGPMPVTAASAAQRRGRVGRNPQKENDQYIFTGQPLNNDED
HAHWTEAKMLLDNINTPEGIIPALFEPEREKSAAIDGEYRLKGESRKTFVELMRRGDL
PVWLAHKVASEGIKYTDRKWCFDGQRNNQILEENMDVEIWTKEGEKKKLRPRWLDART
YSDPLALKEFKDFAAGRKSIALDLVTEIGRVPSHLAHRTRNALDNLVMLHTSEHGGRA
YRHAVEELPETMETLLLLGLMILLTGGAMLFLISGKGIGKTSIGLICVIASSGMLWMA
EIPLQWIASAIVLEFFMMVLLIPEPEKQRTPQDNQLAYVVIGILTLAAIIAANEMGLL
ETTKRDLGMSKEPGVVSPTSYLDVDLHPASAWTLYAVATTVITPMLRHTIENSTANVS
LAAIANQAVVLMGLDKGWPISKMDLGVPLLALGCYSQVNPLTLTAAVLLLITHYAIIG
PGLQAKATREAQKRTAAGIMKNPTVDGIMTIDLDPVIYDSKFEKQLGQVMLLVLCAVQ
LLLMRTSWALCEALTLATGPITTLWEGSPGKFWNTTIAVSMANIFRGSYLAGAGLAFS
IMKSVGTGKRGTGSQGETLGEKWKKKLNQLSRKEFDLYKKSGITEVDRTEAKEGLKRG
EITHHAVSRGSAKLQWFVERNMVIPEGRVIDLGCGRGGWSYYCAGLKKVTEVRGYTKG
GPGHEEPVPMSTYGWNIVKLMSGKDVFYLPPEKCDTLLCDIGESSPSPTVEESRTIRV
LKMVEPWLKNNQFCIKVLNPYMPTVIEHLERLQRKHGGMLVRNPLSRNSTHEMYWISN
GTGNIVSSVNMVSRLLLNRFTMTHRRPTIEKDVDLGAGTRHVNAEPETPNMDVIGERI
KRIKEEHNSTWHYDDENPYKTWAYHGSYEVKATGSASSMINGVVKLLTKPWDVVPMVT
QMAMTDTTPFGQQRVFKEKVDTRTPRPMPGTRKVMGITAEWLWRTLGRNKRPRLCTRE
EFTKKVRTNAAMGAVFTEENQWDSAKAAVEDEEFWKLVDRERELHKLGKCGSCVYNMM
GKREKKLGEFGKAKGSRAIWYMWLGARYLEFEALGFLNEDHWFSRDNSYSGVEGEGLH
KLGYILRDISKIPGGAMYADDTAGWDTRITEDDLHNEEKITQQMDPEHRQLANAIFKL
TYQNKVVKVQRPTPTGTVMDIISRKDQRGSGQVGTYGLNTFTNMEVQLVRQMEGEGVL
SKADLENPHLPEKKITQWLETKGVERLKRMAISGDDCVVKPIDDRFANALLALNDMGK
VRKDIPQWQPSKGWHDWQQVPFCSHHFHELIMKDGRKLVVPCRPQDELIGRARISQGA
GWSLRETACLGKAYAQMWSLMYFHRRDLRLASNAICSAVPVHWVPTSRTTWSIHAHHQ
WMTTEDMLTVWNRVWIEDNPWMEDKTPVTTWENVPYLGKREDQWCGSLIGLTSRATWA
QNIPTAIQQVRSLIGNEEFLDYMPSMKRFRKEEESEGAIW
AMINO ACID SEQUENCE OF DENV4 GENBANK ACCESSION NO. KJ160504.1 (SEQ
ID NO: 4)
MNQRKKVVRPPFNMLKRERNRVSTPQGLVKRFSTGLFSGKGPLR
MVLAFITFLRVLSIPPTAGILKRWGQLKKNKAIKILIGFRKEIGRMLNILNGRKRSTI
TLLCLIPTVMAFHLSTRDGEPLMIVAKHERGRPLLFKTTEGINKCTLIAMDLGEMCED
TVTYKCPLLVNTEPEDIDCWCNLTSTWVMYGTCTQSGERRREKRSVALTPHSGMGLET
RAETWMSSEGAWKHAQRVESWILRNPGFALLAGFMAYMIGQTGIQRTVFFVLMMLVAP
SYGMRCVGVGNRDFVEGVSGGAWVDLVLEHGGCVTTMAQGKPTLDFELTKTTAKEVAL
LRTYCIEASISNITTATRCPTQGEPYLKEEQDQQYICRRDVVDRGWGNGCGLFGKGGV
VTCAKFSCSGKITGNLVQIENLEYTVVVTVHNGDTHAVGNDTSNHGVTATITPRSPSV
EVKLPDYGELTLDCEPRSGIDFNEMILMKMKKKTWLVHKQWFLDLPLPWTAGADTSEV
HWNYKERMVTFKVPHAKRQDVTVLGSQEGAMHSALAGATEVDSGDGNHMFAGHLKCKV
RMEKLRIKGMSYTMCSGKFSIDKEMAETQHGTTVVKVKYEGAGAPCKVPIEIRDVNKE
KVVGRVISSTPLAENTNSVTNIELEPPFGDSYIVIGVGNSALTLHWFRKGSSIGKMFE
STYRGAKRMAILGETAWDFGSVGGLFTSLGKAVHQVFGSVYTTMFGGVSWMIRILIGF
LVLWIGTNSRNTSMAMTCIAVGGITLFLGFTVQADMGCVVSWSGRELKCGSGIFVVDN
VHTWTEQYKFQPESPARLASAILNAHKDGVCGIRSTTRLENVMWKQITNELNYVLWEG
GHDLTVVAGDVKGVLTKGKRALTPPVSDLKYSWKTWGKAKIFTPEARNSTFLIDGPDT
SECPNERRAWNSLEVEDYGFGMFTTNIWMKFREGSSEVCDHRLMSAAIKDQKAVHADM
GYWIESSKNQTWQIEKASLIEVKTCLWPKTHTLWSNGVLESQMLIPKSYAGPFSQHNY
RQGYATQTVGPWHLGKLEIDFGECPGTTVTIQEDCDHRGPSLRTTTASGKLVTQWCCR
SCTMPPLRFLGEDGCWYGMEIRPLSEKEENMVKSQVTAGQGTSETFSMGLLCLTLFVE
ECLRRRVTRKHMILVVVITLCAIILGGLTWMDLLRALIMLGDTMSGRIGGQIHLAIMA
VFKMSPGYVLGVFLRKLTSRETALMVIGMAMTTVLSIPHDLMELIDGISLGLILLKIV
TQFDNTQVGTLALSLTFIRSTMPLVMAWRTIMAVLFVVTLIPLCRTSCLQKQSHWVEI
TALILGAQALPVYLMTLMKGASRRSWPLNEGIMAVGLVSLLGSALLKNDVPLAGPMVA
GGLLLAAYVMSGSSADLSLEKAANVQWDEMADITGSSPIIEVKQDEDGSFSIRDVEET
NMITLLVKLALITVSGLYPLAIPITMTLWYMWQVKTQRSGALWDVPSPAATQKAALSE
GVYRIMQRGLFGKTQVGVGIHMEGVFHTMWHVTRGSVICHETGRLEPSWADVRNDMIS
YGGGWRLGDKWDKEEDVQVLAIEPGKNPKHVQTKPGLFKTLTGEIGAVTLDFKPGTSG
SPIINRKGKVIGLYGNGVVTKSGDYVSAITQAERIGEPDYEVDEDIFRKKRLTIMDLH
PGAGKTKRILPSIVREALKRRLRTLILAPTRVVAAEMEEALRGLPIRYQTPAVKSEHT
GREIVDLMCHATFTTRLLSSTRVPNYNLIVMDEAHFTDPSSVAARGYISTRVEMGEAA
AIFMTATPPGATDPFPQSNSPIEDIEREIPERSWNTGFDWITDYQGKTVWFVPSIKAG
NDIANCLRKSGKKVIQLSRKTFGTEYPKTKLTDWDFVVTTDISEMGANFRAGRVIDPR
RCLKPVILTDGPERVILAGPIPVTPASAAQRRGRVGRNPAQEDDQYVFSGDPLKNDED
HAHWTEAKMLLDNIYTPEGIIPTLFGPEREKTQAIDGEFRLRGEQRKTFVELMRRGDL
PVWLSYKVASAGISYKDREWCFTGERNNQILEENMEVEIWTREGEKKKLRPRWLDARV
YADPMALKDFKEFASGRKSITLDILTEIASLPAYLSSRAKLALDNIVMLHTTERGGRA
YQHALNELPESLETLMLVALLGAMTAGIFLFFMQGKGIGKLSMGLITIAVASGLLWIA
EIQPQWIAASIILEFFLMVLLIPEPEKQRTPQDNQLIYVILTVLTIIGLIAANEMGLI
EKTKTDFGFYQVKTETTILDVDLRPASAWTLYAVATTVLTPMLRHTIENTSANLSLAA
IANQAAVLMGLGKGWPLHRMDLGVPLLAMGCYSQVNPTTLTASLVMLFVHYAIIGPGL
QAKATREAQKRTAAGIMKNPTVDGITVIDLEPISYDPKFEKQLGQVMLLVLCAGQLLL
MRTTWAFCEVLTLATGPILTLWEGNPGRFWNTTIAVSTANIFRGSYLAGAGLAFSLIK
NAQTPRRGTGTTGETLGEKWKRQLNSLDRKEFEEYKRSGILEVDRTEAKSALKDGSKI
KHAVSRGSSKIRWIVERGMVKPKGKVVDLGCGRGGWSYYMATLKNVTEVKGYTKGGPG
HEEPIPMATYGWNLVKLHSGVDVFYKPTEQVDTLLCDIGESSSNPTIEEGRTLRVLKM
VEPWLSSKPEFCIKVLNPYMPTVIEELEKLQRKHGGNLVRCPLSRNSTHEMYWVSGAS
GNIVSSVNTTSKMLLNRFTTRHRKPTYEKDVDLGAGTRSVSTETEKPDMTIIGRRLQR
LQEEHKETWHYDQENPYRTWAYHGSYEAPSTGSASSMVNGVVKLLTKPWDVIPMVTQL
AMTDTTPFGQQRVFKEKVDTRTPQPKPGTRMVMTTTANWLWALLGKKKNPRLCTREEF
ISKVRSNAAIGAVFQEEQGWTSASEAVNDSRFWELVDKERALHQEGKCESCVYNMMGK
REKKLGEFGRAKGSRAIWYMWLGARFLEFEALGFLNEDHWFGRENSWSGVEGEGLHRL
GYILEEIDKKDGDLMYADDTAGWDTRITEDDLQNEELITEQMAPHHKILAKAIFKLTY
QNKVVKVLRPTPRGAVMDIISRKDQRGSGQVGTYGLNTFTNMEVQLIRQMEAEGVITQ
DDMQNPKGLKERVEKWLRECGVDRLKRMAISGDDCVVKPLDERFGTSLLFLNDMGKVR
KDIPQWEPSKGWKNWQEVPFCSHHFHKIFMKDGRSLVVPCRNQDELIGRARISQGAGW
SLRETACLGKAYAQMWSLMYFHRRDLRLASMAICSAVPTEWFPTSRTTWSIHAHHQWM
TTEDMLKVWNRVWIEDNPNMTDKTPVHSWEDIPYLGKREDLWCGSLIGLSSRATWAKN
IHTAITQVRNLIGKEEYVDYMPVMKRYSAPSESEGVL
AMINO ACID SEQUENCE OF ZIKA VIRUS GENBANK ACCESSION NO. KJ776791.2 (SEQ ID
NO: 5)
MKNPKKKSGGFRIVNMLKRGVARVSPFGGLKRLPAGLLLGHGPI
RMVLAILAFLRFTAIKPSLGLINRWGSVGKKEAMEIIKKFKKDLAAMLRIINARKEKK
RRGADTSVGIVGLLLTTAMAAEVTRRGSAYYMYLDRNDAGEAISFPTTLGMNKCYIQI
MDLGHMCDATMSYECPMLDEGVEPDDVDCWCNTTSTWVVYGTCHHKKGEARRSRRAVT
LPSHSTRKLQTRSQTWLESREYTKHLIRVENWIFRNPGFALAAAAIAWLLGSSTSQKV
IYLVMILLIAPAYSIRCIGVSNRDFVEGMSGGTWVDVVLEHGGCVTVMAQDKPTVDIE
LVTTTVSNMAEVRSYCYEASISDMASDSRCPTQGEAYLDKQSDTQYVCKRTLVDRGWG
NGCGLFGKGSLVTCAKFACSKKMTGKSIQPENLEYRIMLSVHGSQHSGMIVNDTGHET
DENRAKVEITPNSPRAEATLGGFGSLGLDCEPRTGLDFSDLYYLTMNNKHWLVHKEWF
HDIPLPWHAGADTGTPHWNNKEALVEFKDAHAKRQTVVVLGSQEGAVHTALAGALEAE
MDGAKGRLSSGHLKCRLKMDKLRLKGVSYSLCTAAFTFTKIPAETLHGTVTVEVQYAG
TDGPCKVPAQMAVDMQTLTPVGRLITANPVITESTENSKMMLELDPPFGDSYIVIGVG
EKKITHHWHRSGSTIGKAFEATVRGAKRMAVLGDTAWDFGSVGGALNSLGKGIHQIFG
AAFKSLFGGMSWFSQILIGTLLMWLGLNTKNGSISLMCLALGGVLIFLSTAVSADVGC
SVDFSKKETRCGTGVFVYNDVEAWRDRYKYHPDSPRRLAAAVKQAWEDGICGISSVSR
MENIMWRSVEGELNAILEENGVQLTVVVGSVKNPMWRGPQRLPVPVNELPHGWKAWGK
SYFVRAAKTNNSFVVDGDTLKECPLKHRAWNSFLVEDHGFGVFHTSVWLKVREDYSLE
CDPAVIGTAVKGKEAVHSDLGYWIESEKNDTWRLKRAHLIEMKTCEWPKSHTLWTDGI
EESDLIIPKSLAGPLSHHNTREGYRTQMKGPWHSEELEIRFEECPGTKVHVEETCGTR
GPSLRSTTASGRVIEEWCCRECTMPPLSFRAKDGCWYGMEIRPRKEPESNLVRSMVTA
GSTDHMDHFSLGVLVILLMVQEGLKKRMTTKIIISTSMAVLVAMILGGFSMSDLAKLA
ILMGATFAEMNTGGDVAHLALIAAFKVRPALLVSFIFRANWTPRESMLLALASCLLQT
AISALEGDLMVLINGFALAWLAIRAMVVPRTDNITLAILAALTPLARGTLLVAWRAGL
ATCGGFMLLSLKGKGSVKKNLPFVMALGLTAVRLVDPINVVGLLLLTRSGKRSWPPSE
VLTAVGLICALAGGFAKADIEMAGPMAAVGLLIVSYVVSGKSVDMYIERAGDITWEKD
AEVTGNSPRLDVALDESGDFSLVEDDGPPMREIILKVVLMTICGMNPIAIPFAAGAWY
VYVKTGKRSGALWDVPAPKEVKKGETTDGVYRVMTRRLLGSTQVGVGVMQEGVFHTMW
HVTKGSALRSGEGRLDPYWGDVKQDLVSYCGPWKLDAAWDGHSEVQLLAVPPGERARN
IQTLPGIFKTKDGDIGAVALDYPAGTSGSPILDKCGRVIGLYGNGVVIKNGSYVSAIT
QGRREEETPVECFEPSMLKKKQLTVLDLHPGAGKTRRVLPEIVREAIKTRLRTVILAP
TRVVAAEMEEALRGLPVRYMTTAVNVTHSGTEIVDLMCHATFTSRLLQPIRVPNYNLY
IMDEAHFTDPSSIAARGYISTRVEMGEAAAIFMTATPPGTRDAFPDSNSPIMDTEVEV
PERAWSSGFDWVTDHSGKTVWFVPSVRNGNEIAACLTKAGKRVIQLSRKTFETEFQKT
KHQEWDFVVTTDISEMGANFKADRVIDSRRCLKPVILDGERVILAGPMPVTHASAAQR
RGRIGRNPNKPGDEYLYGGGCAETDEDHAHWLEARMLLDNIYLQDGLIASLYRPEADK
VAAIEGEFKLRTEQRKTFVELMKRGDLPVWLAYQVASAGITYTDRRWCFDGTTNNTIM
EDSVPAEVWTRHGEKRVLKPRWMDARVCSDHAALKSFKEFAAGKRGAAFGVMEALGTL
PGHMTERFQEAIDNLAVLMRAETGSRPYKAAAAQLPETLETIMLLGLLGTVSLGIFFV
LMRNKGIGKMGFGMVTLGASAWLMWLSEIEPARIACVLIVVFLLLVVLIPEPEKQRSP
QDNQMAIIIMVAVGLLGLITANELGWLERTKSDLSHLMGRREEGATIGFSMDIDLRPA
SAWAIYAALTTFITPAVQHAVTTSYNNYSLMAMATQAGVLFGMGKGMPFYAWDFGVPL
LMIGCYSQLTPLTLIVAIILLVAHYMYLIPGLQAAAARAAQKRTAAGIMKNPVVDGIV
VTDIDTMTLDPQVEKKMGQVLLIAVAVSSAILSRTAWGWGEAGALITAATSTLWEGSP
NKYWNSSTATSLCNIFRGSYLAGASLIYTVTRNAGLVKRRGGGTGETLGEKWKARLNQ
MSALEFYSYKKSGITEVCREEARRALKDGVATGGHAVSRGSAKLRWLVERGYLQPYGK
VIDLGCGRGGWSYYAATIRKVQEVKGYTKGGPGHEEPMLVQSYGWNIVRLKSGVDVFH
MAAEPCDTLLCDIGESSSSPEVEEARTLRVLSMVGDWLEKRPGAFCIKVLCPYTSTMM
ETLERLQRRYGGGLVRVPLSRNSTHEMYWVSGAKSNTIKSVSTTSQLLLGRMDGPRRP
VKYEEDVNLGSGTRAVVSCAEAPNMKIIGNRIERIRSEHAETWFFDENHPYRTWAYHG
SYEAPTQGSASSLINGVVRLLSKPWDVVTGVTGIAMTDTTPYGQQRVFKEKVDTRVPD
PQEGTRQVMSMVSSWLWKELGKHKRPRVCTKEEFINKVRSNAALGAIFEEEKEWKTAV
EAVNDPRFWALVDKEREHHLRGECQSCVYNMMGKREKKQGEFGKAKGSRAIWYMWLGA
RFLEFEALGFLNEDHWMGRENSGGGVEGLGLQRLGYVLEEMSRIPGGRMYADDTAGWD
TRISRFDLENEALITNQMEKGHRALALAIIKYTYQNKVVKVLRPAEKGKTVMDIISRQ
DQRGSGQVVTYALNTFTNLVVQLIRNMEAEEVLEMQDLWLLRRSEKVTNWLQSNGWDR
LKRMAVSGDDCVVKPIDDRFAHALRFLNDMGKVRKDTQEWKPSTGWDNWEEVPFCSHH
FNKLHLKDGRSIVVPCRHQDELIGRARVSPGAGWSIRETACLAKSYAQMWQLLYFHRR
DLRLMANAICSSVPVDWVPTGRTTWSIHGKGEWMTTEDMLVVWNRVWIEENDHMEDKT
PVTKWTDIPYLGKREDLWCGSLIGHRPRTTWAENIKNTVNMVRRIIGDEEKYMDYLST
QVRYLGEEGSTPGVL
AMINO ACID SEQUENCE OF TAMANA BAT VIRUS GENBANK ACCESSION NO. NC_003996 (SEQ
ID NO: 6)
MNKNKKQKPNTKMRSNPQKNKIKLVNKKLQTFFMAFFQILLAVF
KNFKVSLQLRFLEKVYRTVFKNLAIRSPKGAVAIMKWGVGYLKKRKQKRQKSSGGYEI
EAARQALYPITLGVMVIFCGYQSGNEPVCVDFNNQTNIVPYENGKVIFGNVTIVPPID
RFGLLIPTDNYDTIECVRMSPGIELSEEVCGFMGPKYDVLLRTQWGKRETEHMHRTRR
SVTETTHESSGGEHWDYSEYLTDFEHKMSKYKMPVLIILVGYLVLKTQNMALLIILVI
AQFYLADAGHCHDPEKFDIIEAGGYTKMTTFLKHDKCFMVRVPEHDVVEITVVKKTIR
PTTGCKTFLLGASVNTESRAKCPGAGSATIPKTPGDKTFCHIEHVDRGWDSGCFIFGK
GEVVTCAAVTYSKPFYAWMVDSEQITWEVEVNFGGDSNRKKTAEISMDSEYEEFEDPK
NTGSKIRLYCKTPRQEWDNYYMVARPGGSLYKVRRELINDLNLPWTDFKYPYVTTTIV
RNGESILRFKRPTMTYIPVTVAAGLERLYMDVVLQGPVLKCSGNHCTKEQWSGNSETE
LPTITEDVGTLKCEIDYSGLKVRVTNVALCTHTSTIVSGPLVTNDIVMIVLRGTGSDT
TECKLKVEGKSASSNNWITNYCAPHSRSMSVKPNEQTTVKMTCPNGIIDLRFNGKTTT
QVEVKYSRTMKLVSSMMASFKDVTENVMIHESGFETFKKVAKMLTTPVVGFFKSILGL
ASNWYILIFALLLVYVGVNKQGPVGNIMLALGLICLLTYYFEVVAADKYVLMVDTDDM
SLSVGKAHHIEWDWKITMPLIPSLPYQVTLIGLDPKYGITIYRVDSQEEYTNLAKVLS
EKYDLVRKITGWYGNSWIKVPCRVIASDAALNLTADCEKAISENSKVAVLTSEHTPIV
CRDCIEKFVKLSLDKEEQGAFRNHKHYNFQNLTREECVIDGNWTYSSAIEVYSKYELE
NEDEITTTQGGGYGTITIGEKTWKYVEVKFGPISVKNTILFQGVLDSVVPTKRKWVNM
TNWACNFFKKENQVNRGHILAKSLGGPAAGYNCMIQLVKENNEDEDIEKSALDSALKQ
STSYRREIKPKNIKAIYYTQKVDERNIMCGWNGKDSVNVVKASKMNKDNIQDLITKNL
NVLMVIDNNDESSIRALIGDKMLFCEANWVDCNTHDYELSFWTSALITTKSRSYEHKP
CKIQPKDEIFEDADSFFSDEKVVLTTAGISRDNVNFYWLFTFFLGWILFEWAVIVDLG
SIFLYNIKKRWTVLLIIPTVFQLMVNGIITSIVSITVFFCGSMKNTLVTATDIVEGIN
LGHWKRTAMVTLMVSGFFKNEFLSLLMILNFTLNWTHFVPILMCLPHFLGLPNPWIWL
GVLVLALIGLINGKLELDFQNKLVPLPQKKFETQLQLGKVYWTASGIEVEIREEIRMA
KYDYPLLALYLTLVFSASLIHWSFGITTLMLGGSLFNLRDKSKGLIPMPELEEVHDPP
EKLKDGFYSISVAGLCWKYQIGIGYVHNGTLTTQYHVTCGRDLWWKGKSYSPVEENVV
SDYACYFGPWSFPKLQEGSEFTIMMRWKNIALKTMGKITGNYYAIPTEKIPKGQSGTP
IFQEINGTLKPVALAGNSIVFGGESVQVGENPSFAPHLDGKIKQLLNTRGCWEEFVLK
CGAGKTRGVIKDTIQHATRMGVKVLVLVPTRVVANEAYNVLKDVGTVGIQTSTYRNDV
GLMHTIMCHSTFARRIMRKGKRILRNWQLIIVDESHFCNPETLALHNLFMRDLRSPTP
TYSVMYLTATGYTSYDSNSNFFVHDHPVASKNDFLEIIKQNKEKKIVYFVASGPEANE
IAGKLRAEIQNIIIVTRQTFNNTYEAAKTMEQGLILTTNISEMGANYNADIVMDPLEE
IIPVLGEEGVQLEKTVCTRASKIQRRGRVGRSKPGDYYYLAVNEGQINQQMHHQQDIV
WAEAEMCSNLMGEIWEPENFQGSEPPAPINYYLTPQKLATIVNKTEMENGWTYYTSYH
LTDDYGNSIPYNVTDPQLHYTPNHCPKCTGLHFPVWDERNHDMLVSCGRDLDNNDVNT
RTRQNVGVIQPLVQRVFSGIRMQSSGEGCELFSILFGVQCYGWMTYFDMPASWIALAH
QALPPQWRETITPMKLLFILFGFMLKVVYDKIMVNKHLVYNYAPYKGHSQMLMFLTVA
STMLQNEALKIMSYPIWQILFVVFITVIVVETVCGITQREKSTGEVTQLVTIGAVIEI
IYYILADGEILTLIKKLIKVKIQQIENNYEVPQQPIEDTRIRTWSLFDRPPVYLYFTL
HPVIIQLARSTSVKALIQFVDNVKLRKTPVNMPQPTVYFIVAVFISIFNFYYYSFPHL
VASIIPSILLYCVIYCAHYTDIFKRFVDTNHELGNSNNQHIPYSDPAYSEIYRVLVIV
IEITYLLVYKTLTLDSVLVVLHMTSPWIRGPIGEGLNNYGVVILAMSMKHLMIPQSIV
AITAVVLDHLKTTQRFRSSIFTTQILNRMVEHYQDLEWRGRQYKFTLNKLNKHDFLQF
KGENVYELENKDDFPSRGFAKMDWMIKSTLFQPRGFVVDGGCGAGGFSARMCFEKPVA
KILGYTIGKDKHHTPDLNGKKVYKKFNWEIGDLFKKRIRCDTFVMDIGESHPNQEIEA
IGDLKRLNWFKENVDCKNWCIKIMVPTHEQVLHALPKGSTLIRNPWSRNSTLEMYCVP
GSNEPGRMVSNVIKVLNQRINRTSWQGSIMKKLYYPEDEEQVGSTKVNYIIEKEKLQN
FTLQEERRVFNHWKCLGSVEASRKGSSGQNYNSIITAITSGLRKVVPSIEHWMLTSTK
PEDTFSTFLRKVDQPPQPLGNYKSEFQEKFKWVQQWYKSKNKHGRILTNEEVISKFKS
DGALGFRCQHYGSIQEALENPNFFKDLEAEEINHLHGKCTRGVFDVIGKKEKKDLYGK
PKGSRLIMYLDLVERFLEHKYLGFLNSDHWCHPENLPSGVSAVSPYEYPRMIVEKCKI
DPRSDLMENWVIQDDTAGWDTRLHDDVLECEQSFLCDFAESEEHIKHILRIYKNYRNP
MIKLTDDSGTRDLILIGKGQRCSGTVVTYSMNTITNTVVQMMRMQEVLELSNEECLHK
MMVSGDDCLLVLKPEEAIKVSKSLKFINSTGFIRKDVPRHVPSPVVKDWKNISFCSHG
IAKGRMQNGEYLWTLGKNEAEIIGKAQLQIGAFGDEINEQSQAKAMALYLLLTFPMRR
DIRLIAKAIMACCQEGLVPMGKVKEPLIWGEPWLDSMDIVNIINKIYGTNFYTLEEVP
YVRHSLDMERGSTIHTNERSNWKKFLLEKMVPDLSRRNNTAPNMNWLVRNGNRGNLLV
ZIKV/DENV 5J7 Swap (SEQ ID NO: 7)
MKNPKKKSGGFRIVNMLKRGVARVSPFGGLKRLPAGLLLGHGPIRMVLAILAFLRFT
AIKPSLGLINRWGSVGKKEAMEIIKKFKKDLAAMLRIINARKEKKRRGADTSVGIVGL
LLTTAMAAEVTRRGSAYYMYLDRNDAGEAISFPTTLGMNKCYIQIMDLGHMCDAT
MSYECPMLDEGVEPDDVDCWCNTTSTWVVYGTCHHKKGEARRSRRAVTLPSHSTR
KLQTRSQTWLESREYTKHLIRVENWIFRNPGFALAAAAIAWLLGSSTSQKVIYLVMIL
LIAPAYSIRCIGVSNRDFVEGMSGGTWVDVVLEHGGCVTVMAQDKPTVDIELVTTEA
TQLATLRKLCIEGSISDMASDSRCPTQGEAYLDKQSDTQYVCKRTLVDRGWGNGCG
LFGKGSLVTCAKFACLEPIEGKVVQYENLEYRIMLSVHGSQHSGMIVNDTGHETDEN
RAKVEITPNSPRAEATLGGFGSLGLDCEPRTGLDFSEMIILTMKNKAWMVHRQWFFD
LPLPWTSGATTETPTWNNKEALVEFKDAHAKRQTVVVLGSQEGAVHTALAGALEIQ
MNSGGTSIFAGHLKCRLKMDKLRLKGVSYSLCTAAFTFTKIPAETLHGTVTVEVQYA
GTDGPCKVPAQMAVDMQTLTPVGRLITANPVITESTENSKMMLELDPPFGDSYIVIG
VGEKKITHHWHRSGSTIGKAFEATVRGAKRMAVLGDTAWDFGSVGGALNSLGKGI
HQIFGAAFKSLFGGMSWFSQILIGTLLMWLGLNTKNGSISLMCLALGGVLIFLSTAVS
ADVGCSVDFSKKETRCGTGVFVYNDVEAWRDRYKYHPDSPRRLAAAVKQAWEDGI
CGISSVSRMENIMWRSVEGELNAILEENGVQLTVVVGSVKNPMWRGPQRLPVPVNE
LPHGWKAWGKSYFVRAAKTNNSFVVDGDTLKECPLKHRAWNSFLVEDHGFGVFHT
SVWLKVREDYSLECDPAVIGTAVKGKEAVHSDLGYWIESEKNDTWRLKRAHLIEMK
TCEWPKSHTLWTDGIEESDLIIPKSLAGPLSHHNTREGYRTQMKGPWHSEELEIRFEE
CPGTKVHVEETCGTRGPSLRSTTASGRVIEEWCCRECTMPPLSFRAKDGCWYGMEIR
PRKEPESNLVRSMVTAGSTDHMDHFSLGVLVILLMVQEGLKKRMTTKIIISTSMAVL
VAMILGGFSMSDLAKLAILMGATFAEMNTGGDVAHLALIAAFKVRPALLVSFIFRAN
WTPRESMLLALASCLLQTAISALEGDLMVLINGFALAWLAIRAMVVPRTDNITLAIL
AALTPLARGTLLVAWRAGLATCGGFMLLSLKGKGSVKKNLPFVMALGLTAVRLVD
PINVVGLLLLTRSGKRSWPPSEVLTAVGLICALAGGFAKADIEMAGPMAAVGLLIVS
YVVSGKSVDMYIERAGDITWEKDAEVTGNSPRLDVALDESGDFSLVEDDGPPMREII
LKVVLMTICGMNPIAIPFAAGAWYVYVKTGKRSGALWDVPAPKEVKKGETTDGVY
RVMTRRLLGSTQVGVGVMQEGVFHTMWHVTKGSALRSGEGRLDPYWGDVKQDLV
SYCGPWKLDAAWDGHSEVQLLAVPPGERARNIQTLPGIFKTKDGDIGAVALDYPAG
TSGSPILDKCGRVIGLYGNGVVIKNGSYVSAITQGRREEETPVECFEPSMLKKKQLTV
LDLHPGAGKTRRVLPEIVREAIKTRLRTVILAPTRVVAAEMEEALRGLPVRYMTTAV
NVTHSGTEIVDLMCHATFTSRLLQPIRVPNYNLYIMDEAHFTDPSSIAARGYISTRVE
MGEAAAIFMTATPPGTRDAFPDSNSPIMDTEVEVPERAWSSGFDWVTDHSGKTVWF
VPSVRNGNEIAACLTKAGKRVIQLSRKTFETEFQKTKHQEWDFVVTTDISEMGANFK
ADRVIDSRRCLKPVILDGERVILAGPMPVTHASAAQRRGRIGRNPNKPGDEYLYGGG
CAETDEDHAHWLEARMLLDNIYLQDGLIASLYRPEADKVAAIEGEFKLRTEQRKTFV
ELMKRGDLPVWLAYQVASAGITYTDRRWCFDGTTNNTIMEDSVPAEVWTRHGEKR
VLKPRWMDARVCSDHAALKSFKEFAAGKRGAAFGVMEALGTLPGHMTERFQEAID
NLAVLMRAETGSRPYKAAAAQLPETLETIMLLGLLGTVSLGIFFVLMRNKGIGKMGF
GMVTLGASAWLMWLSEIEPARIACVLIVVFLLLVVLIPEPEKQRSPQDNQMAIIIMVA
VGLLGLITANELGWLERTKSDLSHLMGRREEGATIGFSMDIDLRPASAWAIYAALTT
FITPAVQHAVTTSYNNYSLMAMATQAGVLFGMGKGMPFYAWDFGVPLLMIGCYSQ
LTPLTLIVAIILLVAHYMYLIPGLQAAAARAAQKRTAAGIMKNPVVDGIVVTDIDTMT
IDPQVEKKMGQVLLIAVAVSSAILSRTAWGWGEAGALITAATSTLWEGSPNKYWNS
STATSLCNIFRGSYLAGASLIYTVTRNAGLVKRRGGGTGETLGEKWKARLNQMSAL
EFYSYKKSGITEVCREEARRALKDGVATGGHAVSRGSAKLRWLVERGYLQPYGKVI
DLGCGRGGWSYYAATIRKVQEVKGYTKGGPGHEEPMLVQSYGWNIVRLKSGVDVF
HMAAEPCDTLLCDIGESSSSPEVEEARTLRVLSMVGDWLEKRPGAFCIKVLCPYTST
MMETLERLQRRYGGGLVRVPLSRNSTHEMYWVSGAKSNTIKSVSTTSQLLLGRMDG
PRRPVKYEEDVNLGSGTRAVVSCAEAPNMKIIGNRIERIRSEHAETWFFDENHPYRT
WAYHGSYEAPTQGSASSLINGVVRLLSKPWDVVTGVTGIAMTDTTPYGQQRVFKEK
VDTRVPDPQEGTRQVMSMVSSWLWKELGKHKRPRVCTKEEFINKVRSNAALGAIFE
EEKEWKTAVEAVNDPRFWALVDKEREHHLRGECQSCVYNMMGKREKKQGEFGKA
KGSRAIWYMWLGARFLEFEALGFLNEDHWMGRENSGGGVEGLGLQRLGYVLEEMS
RIPGGRMYADDTAGWDTRISRFDLENEALITNQMEKGHRALALAIIKYTYQNKVVK
VLRPAEKGKTVMDIISRQDQRGSGQVVTYALNTFTNLVVQLIRNMEAEEVLEMQDL
WLLRRSEKVTNWLQSNGWDRLKRMAVSGDDCVVKPIDDRFAHALRFLNDMGKVR
KDTQEWKPSTGWDNWEEVPFCSHHFNKLHLKDGRSLVVPCRHQDELIGRARVSPGA
GWSIRETACLAKSYAQMWQLLYFHRRDLRLMANAICSSVPVDWVPTGRTTWSIHG
KGEWMTTEDMLVVWNRVWIEENDHMEDKTPVTKWTDIPYLGKREDLWCGSLIGH
RPRTTWAENIKNTVNMVRRIIGDEEKYMDYLSTQVRYLGEEGSTPGVL
DENV/ZIKV 5J7 Swap (SEQ ID NO: 8)
MNNQRKKTGKPSINMLKRVRNRVSTGPQLAKRFSKGLLNGQGPMKLVMAFIAFLRF
LAIPPTAGVLARWGTFKKSGAIKVLKGFKKEISNMLSIINKRKKTSLCLMMILPAALA
FHLTSRDGEPRMIVGKNERGKSLLFKTASGINMCTLIAMDLGEMCDDTVTYKCPHIT
EVEPEDIDCWCNLTSTWVTYGTCNQAGEHRRDKRSVALAPHVGMGLDTRTQTWMS
AEGAWRQVEKVETWALRHPGFTILALFLAHYIGTSLTQKVVIFILLMLVTPSMTMRC
VGIGNRDFVEGLSGATWVDVVLEHGGCVTTMAKNKPTLDIELQKTTVSNMAEVRS
YCYEAKITNITTDSRCPTQGEAVLPEEQDQNYVCKHTYVDRGWGNGCGLFGKGSLV
TCAKFQCSKKMTGKSIQPENLKYTVIITVHTGDQHQVGNETQGVTAEITPQASTTEAI
LPEYGTLGLECSPRTGLDFNDLYLLTMNNKHWLVHKEWFHDIPLPWHAGADTGTPH
WNRKELLVTFKNAHAKKQEVVVLGSQEGAMHTALTGATEAEMDGAKGRLSSGHL
KCRLKMDKLELKGMSYAMCTNTFVLKKEVSETQHGTILIKVEYKGEDAPCKIPFSTE
DGQGKAHNGRLITANPVVTKKEEPVNIEAEPPFGESNIVIGIGDNALKINWYKKGSSI
GKMFEATARGARRMAILGDTAWDFGSVGGVLNSLGKMVHQIFGSAYTALFSGVSW
VMKIGIGVLLTWIGLNSKNTSMSFSCIAIGIITLYLGAVVQADMGCVINWKGKELKCG
SGIFVTNEVHTWTEQYKFQADSPKRLATAIAGAWENGVCGIRSTTRMENLLWKQIA
NELNYILWENNIKLTVVVGDTIGVLEQGKRTLTPQPMELKYSWKTWGKAKIVTAET
QNSSFIIDGPNTPECPSASRAWNVWEVEDYGFGVFTTNIWLKLRDVYTQLCDHRLMS
AAVKDERAVHADMGYWIESQKNGSWKLEKASLIEVKTCTWPKSHTLWSNGVLESD
MIIPKSLAGPISQHNYRPGYHTQTAGPWHLGKLELDFNYCEGTTVVITENCGTRGPSL
RTTTVSGKLIHEWCCRSCTLPPLRYMGEDGCWYGMEIRPISEKEENMVKSLVSAGSG
KVDNFTMGVLCLAILFEEVMRGKFGKKHMIAGVLFTFVLLLSGQITWRDMAHTLIMI
GSNASDRMGMGVTYLALIATFKIQPFLALGFFLRKLTSRENLLLGVGLAMATTLQLP
EDIEQMANGIALGLMALKLITQFETYQLWTALVSLTCSNTILTLTVAWRTATLILAGV
SLLPVCQSSSMRKTDWLPMTVAAMGVPPLPLFIFSLKDTLKRRSWPLNEGVMAVGL
VSILASSURNDVPMAGPLVAGGLLIACYVITGTSADLTVEKAADVTWEEEAEQTGV
SHNILMITVDDDGTMRIKDDETENILTVLLKTALLIVSGIFPYSIPATLLVWHTWQKQT
QRSGVLWDVPSPPETQKAELEEGVYRIKQQGILGKTQVGVGVQKEGVFHTMWHVT
RGAVLTHNGKRLEPNWASVKKDLISYGGGWRLSAQWQKGEEVQVIAVEPGKNPKN
FQTMPGTFQTTTGEIGAIALDFKPGTSGSPIINREGKVVGLYGNGVVTKNGGYVSGIA
QTNAEPDGPTPELEEEMFKKRNLTIMDLHPGSGKTRKYLPAIVREAIKRRLRTLILAPT
RVVAAEMEEALKGLPIRYQTTATKSEHTGREIVDLMCHATFTMRLLSPVRVPNYNLII
MDEAHFTDPASIAARGYISTRVGMGEAAAIFMTATPPGTADAFPQSNAPIQDEERDIP
ERSWNSGNEWITDFAGKTVWFVPSIKAGNDIANCLRKNGKKVIQLSRKTFDTEYQKT
KLNDWDFVVTTDISEMGANFKADRVIDPRRCLKPVILTDGPERVILAGPMPVTAASA
AQRRGRVGRNPQKENDQYIFTGQPLNNDEDHAHWTEAKMLLDNINTPEGIIPALFEP
EREKSAAIDGEYRLKGESRKTFVELMRRGDLPVWLAHKVASEGIKYTDRKWCFDGQ
RNNQILEENMDVEIWTKEGEKKKLRPRWLDARTYSDPLALKEFKDFAAGRKSIALD
LVTEIGRVPSHLAHRTRNALDNLVMLHTSEHGGRAYRHAVEELPETMETLLLLGLMI
LLTGGAMLFLISGKGIGKTSIGLICVIASSGMLWMAEIPLQWIASAIVLEFFMMVLLIP
EPEKQRTPQDNQLAYVVIGILTLAAIIAANEMGLLETTKRDLGMSKEPGVVSPTSYLD
VDLHPASAWTLYAVATTVITPMLRHTIENSTANVSLAAIANQAVVLMGLDKGWPIS
KMDLGVPLLALGCYSQVNPLTLTAAVLLLITHYAIIGPGLQAKATREAQKRTAAGIM
KNPTVDGIMTIDLDPVIYDSKFEKQLGQVMLLVLCAVQLLLMRTSWALCEALTLAT
GPITTLWEGSPGKFWNTTIAVSMANIFRGSYLAGAGLAFSIMKSVGTGKRGTGSQGE
TLGEKWKKKLNQLSRKEFDLYKKSGITEVDRTEAKEGLKRGEITHHAVSRGSAKLQ
WFVERNMVIPEGRVIDLGCGRGGWSYYCAGLKKVTEVRGYTKGGPGHEEPVPMST
YGWNIVKLMSGICDVFYLPPEKCDTLLCDIGESSPSPTVEESRTIRVLKMVEPWLKNN
QFCIKVLNPYMPTVIEHLERLQRKHGGMLVRNPLSRNSTHEMYWISNGTGNIVSSVN
MVSRLLLNRFTMTHRRPTIEKDVDLGAGTRHVNAEPETPNMDVIGERIKRIKEEHNS
TWHYDDENPYKTWAYHGSYEVKATGSASSMINGVVKLLTKPWDVVPMVTQMAM
TDTTPFGQQRVFKEKVDTRTPRPMPGTRKVMGITAEWLWRTLGRNKRPRLCTREEF
TKKVRTNAAMGAVFTEENQWDSAKAAVEDEEFWKLVDRERELHKLGKCGSCVYN
MMGKREKKLGEFGKAKGSRAIWYMWLGARYLEFEALGFLNEDHWFSRDNSYSGV
EGEGLHKLGYILRDISKIPGGAMYADDTAGWDTRITEDDLHNEEKITQQMDPEHRQL
ANAIFKLTYQNKVVKVQRPTPTGTVMDIISRKDQRGSGQVGTYGLNTFTNMEVQLV
RQMEGEGVLSKADLENPHLPEKKITQWLETKGVERLKRMAISGDDCVVKPIDDRFA
NALLALNDMGKVRKDIPQWQPSKGWHDWQQVPFCSHHFHELIMKDGRKLVVPCRP
QDELIGRARISQGAGWSLRETACLGKAYAQMWSLMYFHRRDLRLASNAICSAVPVH
WVPTSRTTWSIHAHHQWMTTEDMLTVWNRVWIEDNPWMEDKTPVTTWENVPYLG
KREDQWCGSLIGLTSRATWAQNIPTAIQQVRSLIGNEEFLDYMPSMKRFRKEEESEG
AIW
DENV/ZIKV EDIII Swap (SEQ ID NO: 9)
MNQRKKVVRPPFNMLKRERNRVSTPQGLVKRFSTGLFSGKGPLRMVLAFITFLRVLS
IPPTAGILKRWGQLKKNKAIKILIGFRKEIGRMLNILNGRKRSTITLLCLIPTVMAFHLS
TRDGEPLMIVAKHERGRPLLFKTTEGINKCTLIAMDLGEMCEDTVTYKCPLLVNTEP
EDIDCWCNLTSTWVMYGTCTQSGERRREKRSVALTPHSGMGLETRAETWMSSEGA
WKHAQRVESWILRNPGFALLAGFMAYMIGQTGIQRTVFFVLMMLVAPSYGMRCVG
VGNRDFVEGVSGGAWVDLVLEHGGCVTTMAQGKPTLDFELTKTTAKEVALLRTYC
IEASISNITTATRCPTQGEPYLKEEQDQQYICRRDVVDRGWGNGCGLFGKGGVVTCA
KFSCSGKITGNLVQIENLEYTVVVTVHNGDTHAVGNDTSNHGVTATITPRSPSVEVK
LPDYGELTLDCEPRSGIDFNEMILMKMKKKTWLVHKQWFLDLPLPWTAGADTSEVH
WNYKERMVTFKVPHAKRQDVTVLGSQEGAMHSALAGATEVDSGDGNHMFAGHLK
CKVRMEKLRIKGVSYSLCTAAFTFTKIPAETLHGTVTVEVQYAGTDGPCKVPAQMA
VDMQTLTPVGRLITANPVITESTENSKMMLELDPPFGDSYIVIGVGEKKITHHWHRSG
STIGKMFESTYRGAKRMAILGETAWDFGSVGGLFTSLGKAVHQVFGSVYTTMFGGV
SWMIRILIGFLVLWIGTNSRNTSMAMTCIAVGGITLFLGFTVQADMGCVVSWSGREL
KCGSGIFVVDNVHTWTEQYKFQPESPARLASAILNAHKDGVCGIRSTTRLENVMWK
QITNELNYVLWEGGHDLTVVAGDVKGVLTKGKRALTPPVSDLKYSWKTWGKAKIF
TPEARNSTFLIDGPDTSECPNERRAWNSLEVEDYGFGMFTTNIWMKFREGSSEVCDH
RLMSAAIKDQKAVHADMGYWIESSKNQTWQIEKASLIEVKTCLWPKTHTLWSNGV
LESQMLIPKSYAGPFSQHNYRQGYATQTVGPWHLGKLEIDFGECPGTTVTIQEDCDH
RGPSLRTTTASGKLVTQWCCRSCTMPPLRFLGEDGCWYGMEIRPLSEKEENMVKSQ
VTAGQGTSETFSMGLLCLTLFVEECLRRRVTRIGIMILVVVITLCAIILGGLTWMDLLR
ALIMLGDTMSGRIGGQIHLAIMAVFKMSPGYVLGVFLRKLTSRETALMVIGMAMTT
VLSIPHDLMELIDGISLGLILLKIVTQFDNTQVGTLALSLTFIRSTMPLVMAWRTIMAV
LFVVTLIPLCRTSCLQKQSHWVEITALILGAQALPVYLMTLMKGASRRSWPLNEGIM
AVGLVSLLGSALLKNDVPLAGPMVAGGLLLAAYVMSGSSADLSLEKAANVQWDE
MADITGSSPIIEVKQDEDGSFSIRDVEETNMITLLVKLALITVSGLYPLAIPITMTLWY
MWQVKTQRSGALWDVPSPAATQKAALSEGVYRIMQRGLFGKTQVGVGIHMEGVF
HTMWHVTRGSVICHETGRLEPSWADVRNDMISYGGGWRLGDKWDKEEDVQVLAIE
PGKNPKHVQTKPGLFKTLTGEIGAVTLDFKPGTSGSPIINRKGKVIGLYGNGVVTKSG
DYVSAITQAERIGEPDYEVDEDIFRKKRLTIMDLHPGAGKTKRILPSIVREALKRRLRT
LILAPTRVVAAEMEEALRGLPIRYQTPAVKSEHTGREIVDLMCHATFTTRLLSSTRVP
NYNLIVMDEAHFTDPSSVAARGYISTRVEMGEAAAIFMTATPPGATDPFPQSNSPIEDI
EREIPERSWNTGFDWITDYQGKTVWFVPSIKAGNDIANCLRKSGKKVIQLSRKTFGTE
YPKTKLTDWDFVVTTDISEMGANFRAGRVIDPRRCLKPVILTDGPERVILAGPIPVTP
ASAAQRRGRVGRNPAQEDDQYVFSGDPLKNDEDHAHWTEAKMLLDNIYTPEGIIPT
LFGPEREKTQAIDGEFRLRGEQRKTFVELMRRGDLPVWLSYKVASAGISYKDREWCF
TGERNNQILEENMEVEIWTREGEKKKLRPRWLDARVYADPMALKDFKEFASGRKSI
TLDILTEIASLPAYLSSRAKLALDNIVMLHTTERGGRAYQHALNELPESLETLMLVAL
LGAMTAGIFLFFMQGKGIGKLSMGLITIAVASGLLWIAEIQPQWIAASIILEFFLMVLLI
PEPEKQRTPQDNQUYVILTVLTIIGLIAANEMGLIEKTKTDFGFYQVKTETTILDVDLR
PASAWTLYAVATTVLTPMLRHTIENTSANLSLAAIANQAAVLMGLGKGWPLHRMD
LGVPLLAMGCYSQVNPTTLTASLVMLFVHYAIIGPGLQAKATREAQKRTAAGIMKN
PTVDGITVIDLEPISYDPKFEKQLGQVMLLVLCAGQLLLMRTTWAFCEVLTLATGPIL
TLWEGNPGRFWNTTIAVSTANIFRGSYLAGAGLAFSLIKNAQTPRRGTGTTGETLGE
KWKRQLNSLDRKEFEEYKRSGILEVDRTEAKSALKDGSKIKHAVSRGSSKIRWIVER
GMVKPKGKVVDLGCGRGGWSYYMATLKNVTEVKGYTKGGPGHEEPIPMATYGWN
LVKLHSGVDVFYKPTEQVDTLLCDIGESSSNPTIEEGRTLRVLKMVEPWLSSKPEFCI
KVLNPYMPTVIEELEKLQRKHGGNLVRCPLSRNSTHEMYWVSGASGNIVSSVNTTSK
MLLNRFTTRHRKPTYEKDVDLGAGTRSVSTETEKPDMTIIGRRLQRLQEEHKETWHY
DQENPYRTWAYHGSYEAPSTGSASSMVNGVVKLLTKPWDVIPMVTQLAMTDTTPF
GQQRVFKEKVDTRTPQPKPGTRMVMTTTANWLWALLGKKKNPRLCTREEFISKVRS
NAAIGAVFQEEQGWTSASEAVNDSRFWELVDKERALHQEGKCESCVYNMMGKREK
KLGEFGRAKGSRAIWYMWLGARFLEFEALGFLNEDHWFGRENSWSGVEGEGLHRL
GYILEEIDKKDGDLMYADDTAGWDTRITEDDLQNEELITEQMAPHHKILAKAIFKLT
YQNKVVKVLRPTPRGAVMDIISRKDQRGSGQVGTYGLNTFTNMEVQLIRQMEAEGV
ITQDDMQNPKGLKERVEKWLRECGVDRLKRMAISGDDCVVKPLDERFGTSLLFLND
MGKVRKDIPQWEPSKGWKNWQEVPFCSHHFHKIFMKDGRSLVVPCRNQDELIGRA
RISQGAGWSLRETACLGKAYAQMWSLMYFHRRDLRLASMAICSAVPTEWFPTSRTT
WSIHAHHQWMTTEDMLKVWNRVWIEDNPNMTDKTPVHSWEDIPYLGKREDLWCG
SLIGLSSRATWAKNIHTAITQVRNLIGKEEYVDYMPVMKRYSAPSESEGVL
DENV/ZIKV Z20 Swap (SEQ ID NO: 10)
MNQRKKVVRPPFNMLKRERNRVSTPQGLVKRFSTGLFSGKGPLRMVLAFITFLRVLS
IPPTAGILKRWGQLKKNKAIKILIGFRKEIGRMLNILNGRKRSTITLLCLIPTVMAFHLS
TRDGEPLMIVAKHERGRPLLFKTTEGINKCTLIAMDLGEMCEDTVTYKCPLLVNTEP
EDIDCWCNLTSTWVMYGTCTQSGERRREKRSVALTPHSGMGLETRAETWMSSEGA
WKHAQRVESWILRNPGFALLAGFMAYMIGQTGIQRTVFFVLMMLVAPSYGMRCVG
VGNRDFVEGVSGGAWVDLVLEHGGCVTTMAQGKPTLDFELTKTTAKEVALLRTYC
IEASISDMATATRCPTQGEPYLKKEQDQQYICRRDVVDRGWGNGCGLFGKGGVVTC
AKFACSGKITGNLVQIENLEYTVVVTVHNGDTHAVGNDTSNHGVTATITPRSPSVEV
KLPDYGELTLDCEPRSGIDFNEMILMKMKNKTWLVHKQWFLDLPLPWTAGADTGT
VHWNYKERMVTFKVPHAKRQDVTVLGSQEGAMHSALAGATEVEMDGDGNHMFA
GHLKCKVRMEKLRIKGMSYTMCSGKFSIDKEMAETQHGTTVVKVKYEGAGAPCKV
PIEIRDVNKEKVVGRVISSTPLAENTNSVTNIELEPPFGDSYIVIGVGNSALTLHWFRK
GSSIGKMFESTYRGAKRMAILGETAWDFGSVGGLFTSLGKAVHQVFGSVYTTMFGG
VSWMIRILIGELVLWIGTNSRNTSMAMTCIAVGGITLFLGFTVQADMGCVVSWSGRE
LKCGSGIFVVDNVHTWTEQYKFQPESPARLASAILNAHKDGVCGIRSTTRLENVMW
KQITNELNYVLWEGGHDLTVVAGDVKGVLTKGKRALTPPVSDLKYSWKTWGKAKI
FTPEARNSTFLIDGPDTSECPNERRAWNSLEVEDYGFGMFTTNIWMKFREGSSEVCD
HRLMSAAIKDQKAVHADMGYWIESSKNQTWQIEKASLIEVKTCLWPKTHTLWSNG
VLESQMLIPKSYAGPFSQHNYRQGYATQTVGPWHLGKLEIDFGECPGTTVTIQEDCD
HRGPSLRTTTASGKLVTQWCCRSCTMPPLRFLGEDGCWYGMEIRPLSEKEENMVKS
QVTAGQGTSETFSMGLLCLTLFVEECLRRRVTRICHMILVVVITLCAIILGGLTWMDL
LRALIMLGDTMSGRIGGQIHLAIMAVFKMSPGYVLGVFLRKLTSRETALMVIGMAM
TTVLSIPHDLMELIDGISLGLILLKIVTQFDNTQVGTLALSLTFIRSTMPLVMAWRTIM
AVLFVVTLIPLCRTSCLQKQSHWVEITALILGAQALPVYLMTLMKGASRRSWPLNEG
IMAVGLVSLLGSALLKNDVPLAGPMVAGGLLLAAYVMSGSSADLSLEKAANVQWD
EMADITGSSPIIEVKQDEDGSFSIRDVEETNMITLLVKLALITVSGLYPLAIPITMTLWY
MWQVKTQRSGALWDVPSPAATQKAALSEGVYRIMQRGLFGKTQVGVGIHMEGVF
HTMWHVTRGSVICHETGRLEPSWADVRNDMISYGGGWRLGDKWDKEEDVQVLAIE
PGKNPKHVQTKPGLFKTLTGEIGAVTLDFKPGTSGSPIINRKGKVIGLYGNGVVTKSG
DYVSAITQAERIGEPDYEVDEDIFRKKRLTIMDLHPGAGKTKRILPSIVREALKRRLRT
LILAPTRVVAAEMEEALRGLPIRYQTPAVKSEHTGREIVDLMCHATFTTRLLSSTRVP
NYNLIVMDEAHFTDPSSVAARGYISTRVEMGEAAAIFMTATPPGATDPFPQSNSPIEDI
EREIPERSWNTGFDWITDYQGKTVWFVPSIKAGNDIANCLRKSGKKVIQLSRKTFGTE
YPKTKLTDWDFVVTTDISEMGANFRAGRVIDPRRCLKPVILTDGPERVILAGPIPVTP
ASAAQRRGRVGRNPAQEDDQYVFSGDPLKNDEDHAHWTEAKMLLDNIYTPEGIIPT
LFGPEREKTQAIDGEFRLRGEQRKTFVELMRRGDLPVWLSYKVASAGISYKDREWCF
TGERNNQILEENMEVEIWTREGEKKKLRPRWLDARVYADPMALKDFKEFASGRKSI
TLDILTEIASLPAYLSSRAKLALDNIVMLHTTERGGRAYQHALNELPESLETLMLVAL
LGAMTAGIFLFFMQGKGIGKLSMGLITIAVASGLLWIAEIQPQWIAASIILEFFLMVLLI
PEPEKQRTPQDNQUYVILTVLTIIGLIAANEMGLIEKTKTINGFYQVKTETTILDVDLR
PASAWTLYAVATTVLTPMLRHTIENTSANLSLAAIANQAAVLMGLGKGWPLHRMD
LGVPLLAMGCYSQVNPTTLTASLVMLFVHYAIIGPGLQAKATREAQKRIAAG1MKN
PTVDGITVIDLEPISYDPKFEKQLGQVMLLVLCAGQLLLMRTTWAFCEVLTLATGPIL
TLWEGNPGRFWNTTIAVSTANIFRGSYLAGAGLAFSLIKNAQTPRRGTGTTGETLGE
KWKRQLNSLDRKEFEEYKRSGILEVDRTEAKSALKDGSKIKHAVSRGSSKIRWIVER
GMVKPKGKVVDLGCGRGGWSYYMATLKNVTEVKGYTKGGPGHEEPIPMATYGWN
LVKLHSGVDVFYKPTEQVDTLLCDIGESSSNPTIEEGRTLRVLKMVEPWLSSKPEFCI
KVLNPYMPTVIEELEKLQRKHGGNLVRCPLSRNSTHEMYWVSGASGNIVSSVNTTSK
MLLNRFTTRHRKPTYEKDVDLGAGTRSVSTETEKPDMTIIGRRLQRLQEEHKETWHY
DQENPYRTWAYHGSYEAPSTGSASSMVNGVVKLLTKPWDVIPMVTQLAMTDTTPF
GQQRVFKEKVDTRTPQPKPGTRMVMTTTANWLWALLGKKKNPRLCTREEFISKVRS
NAAIGAVFQEEQGWTSASEAVNDSRFWELVDKERALHQEGKCESCVYNMMGKREK
KLGEFGRAKGSRAIWYMWLGARFLEFEALGFLNEDHWFGRENSWSGVEGEGLHRL
GYILEEIDKKDGDLMYADDTAGWDTRITEDDLQNEELITEQMAPHHKILAKAIFKLT
YQNKVVKVLRPTPRGAVMDIISRKDQRGSGQVGTYGLNTFTNMEVQLIRQMEAEGV
ITQDDMQNPKGLKERVEKWLRECGVDRLKRMAISGDDCVVKPLDERFGTSLLFLND
MGKVRKDIPQWEPSKGWKNWQEVPFCSHHFHKIFMKDGRSLVVPCRNQDELIGRA
RISQGAGWSLRETACLGKAYAQMWSLMYHIRRDLRLASMAICSAVPTEWETTSRTT
WSIHAHHQWMTTEDMLKVWNRVWIEDNPNMTDKTPVHSWEDIPYLGKREDLWCG
SLIGLSSRATWAKNIHTAITQVRNLIGKEEYVDYMPVMKRYSAPSESEGVL
DENV/ZIKV Z3L1 Swap (SEQ ID NO: 11)
MNQRKKVVRPPFNMLKRERNRVSTPQGLVKRFSTGLFSGKGPLRMVLAFITFLRVLS
IPPTAGILKRWGQLKKNKAIKILIGFRKEIGRMLNILNGRKRSTITLLCLIPTVMAFHLS
TRDGEPLMIVAKHERGRPLLFKTTEGINKCTLIAMDLGEMCEDTVTYKCPLLVNTEP
EDIDCWCNLTSTWVMYGTCTQSGERRREKRSVALTPHSGMGLETRAETWMSSEGA
WKHAQRVESWILRNPGFALLAGFMAYMIGQTGIQRTVFFVLMMLVAPSYGMRCVG
VGNRDFVEGVSGGAWVDLVLEHGGCVTTMAQGKPTLDFELVTTTAKNVALLRTYC
IEASISNITTATRCPTQGEPYLKEEQDQQYICRRDVVDRGWGNGCGLFGKGGVVTCA
KFSCSGKITGNLVQIENLEYRVMVTVHNGDTHATGHETSNHGVKAEITPRSPSVEVK
LPDYGELTLDCEPRSGIDFNEMILMKMKNKTWLVHKQWFLDLPLPWTAGADTSEVH
WNYKERMVTFKVPHAKRQDVTVLGSQEGAMHSALAGATEVEMDGAKNRMFAGH
LKCKVRMEKLRIKGMSYTMCSGKFSIDKEMAETQHGTTVVKVKYEGAGAPCKVPIE
IRDVNKEKVVGRVISSTPLAENTNSVTNIELEPPFGDSYIVIGVGNSALTLHWFRKGSS
IGKMFESTYRGAKRMAILGETAWDFGSVGGLFTSLGKAVHQVFGSVYTTMFGGVS
WMIRILIGFLVLWIGTNSRNTSMAMTCIAVGGITLFLGFIVQADMGCVVSWSGRELK
CGSGIFVVDNVHTWTEQYKFQPESPARLASAILNAHKDGVCGIRSTTRLENVMWKQI
TNELNYVLWEGGHDLTVVAGDVKGVLTKGKRALTPPVSDLKYSWKTWGKAKIFTP
EARNSTFLIDGPDTSECPNERRAWNSLEVEDYGFGMFTTNIWMKFREGSSEVCDHRL
MSAAIKDQKAVHADMGYWIESSKNQTWQIEKASLIEVKTCLWPKTHTLWSNGVLES
QMLIPKSYAGPFSQHNYRQGYATQTVGPWHLGKLEIDFGECPGTTVTIQEDCDHRGP
SLRTTTASGKLVTQWCCRSCTMPPLRFLGEDGCWYGMEIRPLSEKEENMVKSQVTA
GQGTSETFSMGLLCLTLFVEECLRRRVTRKHMILVVVITLCAIILGGLTWMDLLRALI
MLGDTMSGRIGGQIHLAIMAVFKMSPGYVLGVFLRKLTSRETALMVIGMAMTTVLSI
PHDLMELIDGISLGLILLKIVTQFDNTQVGTLALSLTFIRSTMPLVMAWRTIMAVLFV
VTLIPLCRTSCLQKQSHWVEITALILGAQALPVYLMTLMKGASRRSWPLNEGIMAVG
LVSLLGSALLKNDVPLAGPMVAGGLLLAAYVMSGSSADLSLEKAANVQWDEMADI
TGSSPIIEVKQDEDGSFSIRDVEETNMITLLVKLALITVSGLYPLAIPITMTLWYMWQV
KTQRSGALWDVPSPAATQKAALSEGVYRIMQRGLFGKTQVGVGIHMEGVFHTMWH
VTRGSVICHETGRLEPSWADVRNDMISYGGGWRLGDKWDKEEDVQVLAIEPGKNP
KHVQTKPGLFKTLTGEIGAVTLDFKPGTSGSPIINRKGKVIGLYGNGVVTKSGDYVSA
ITQAERIGEPDYEVDEDIFRKKRLTIMDLHPGAGKTKRILPSIVREALKRRLRTLILAPT
RVVAAEMEEALRGLPIRYQTPAVKSEHTGREIVDLMCHATFTTRLLSSTRVPNYNLIV
MDEAHFTDPSSVAARGYISTRVEMGEAAAIFMTATPPGATDPFPQSNSPIEDIEREIPE
RSWNTGFDWITDYQGKTVWFVPSIKAGNDIANCLRKSGKKVIQLSRKTFGTEYPKTK
LTDWDFVVTTDISEMGANFRAGRVIDPRRCLKPVILTDGPERVILAGPIPVTPASAAQ
RRGRVGRNPAQEDDQYVFSGDPLKNDEDHAHWTEAKMLLDNIYTPEGIIPTLFGPER
EKTQAIDGEFRLRGEQRKTFVELMRRGDLPVWLSYKVASAGISYKDREWCFTGERN
NQILEENMEVEIWTREGEKKKLRPRWLDARVYADPMALKDFKEFASGRKSITLDILT
EIASLPAYLSSRAKLALDNIVMLHTTERGGRAYQHALNELPESLETLMLVALLGAMT
AGIFLFFMQGKGIGKLSMGLITIAVASGLLWIAEIQPQWIAASIILEFFLMVLLIPEPEK
QRTPQDNQLIYVILTVLTIIGLIAANEMGLIEKTKTDFGFYQVKTETTILDVDLRPASA
WTLYAVATTVLTPMLRHTIENTSANLSLAAIANQAAVLMGLGKGWPLHRMDLGVP
LLAMGCYSQVNPTTLTASLVMLFVHYAIIGPGLQAKATREAQKRTAAGIMKNPTVD
GITVIDLEPISYDPKFEKQLGQVMLLVLCAGQLLLMRTTWAFCEVLTLATGPILTLWE
GNPGRFWNTTIAVSTANIFRGSYLAGAGLAFSLIKNAQTPRRGTGTTGETLGEKWKR
QLNSLDRKEFEEYKRSGILEVDRTEAKSALKDGSKIKHAVSRGSSKIRWIVERGMVK
PKGKVVDLGCGRGGWSYYMATLKNVTEVKGYTKGGPGHEEPIPMATYGWNLVKL
HSGVDVFYKPTEQVDTLLCDIGESSSNPTIEEGRTLRVLKMVEPWLSSKPEFCIKVLN
PYMPTVIEELEKLQRKHGGNLVRCPLSRNSTHEMYWVSGASGNIVSSVNTTSKMLL
NRFTTRHRKPTYEKDVDLGAGTRSVSTETEKPDMTIIGRRLQRLQEEHKETWHYDQE
NPYRTWAYHGSYEAPSTGSASSMVNGVVKLLTKPWDVIPMVTQLAMTDTTPFGQQ
RVFKEKVDTRTPQPKPGTRMVMTTTANWLWALLGKKKNPRLCTREEFISKVRSNAA
IGAVFQEEQGWTSASEAVNDSRFWELVDKERALHQEGKCESCVYNMMGKREKKLG
EFGRAKGSRAIWYMWLGARFLEFEALGFLNEDHWFGRENSWSGVEGEGLHRLGYIL
EEIDKKDGDLMYADDTAGWDTRITEDDLQNEELITEQMAPHHKILAKAIFKLTYQNK
VVKVLRPTPRGAVMDIISRKDQRGSGQVGTYGLNTFTNMEVQLIRQMEAEGVITQD
DMQNPKGLKERVEKWLRECGVDRLKRMAISGDDCVVKPLDERFGTSLLFLNDMGK
VRKDIPQWEPSKGWKNWQEVPFCSHHFHKIFMKDGRSLVVPCRNQDELIGRARISQ
GAGWSLRETACLGKAYAQMWSLMYFHRRDLRLASMAICSAVPTEWFPTSRTTWSI
HAHHQWMTTEDMLKVWNRVWIEDNPNMTDKTPVHSWEDIPYLGKREDLWCGSLI
GLSSRATWAKNIHTAITQVRNLIGKEEYVDYMPVMKRYSAPSESEGVL
DENV/ZIKV Z20/Z3L1 Double Swap (SEQ ID NO: 12)
MNQRKKVVRPPFNMLKRERNRVSTPQGLVKRFSTGLFSGKGPLRMVLAFITFLRVLS
IPPTAGILKRWGQLKKNKAIKILIGFRKEIGRMLNILNGRKRSTITLLCLIPTVMAFHLS
TRDGEPLMIVAKHERGRPLLFKTTEGINKCTLIAMDLGEMCEDTVTYKCPLLVNTEP
EDIDCWCNLTSTWVMYGTCTQSGERRREKRSVALTPHSGMGLETRAETWMSSEGA
WKHAQRVESWILRNPGFALLAGFMAYMIGQTGIQRTVFFVLMMLVAPSYGMRCVG
VGNRDFVEGVSGGAWVDLVLEHGGCVTTMAQGKPTLDFELVTTTAKNVALLRTYC
IEASISDMATATRCPTQGEPYLKKEQDQQYICRRDVVDRGWGNGCGLFGKGGVVTC
AKFACSGKITGNLVQIENLEYRVMVTVHNGDTHATGHETSNHGVKAEITPRSPSVEV
KLPDYGELTLDCEPRSGIDFNEMILMKMKNKTWLVHKQWFLDLPLPWTAGADTGT
VHWNYKERMVTFKVPHAKRQDVTVLGSQEGAMHSALAGATEVEMDGAKNRMFA
GHLKCKVRMEKLRIKGMSYTMCSGKFSIDKEMAETQHGTTVVKVKYEGAGAPCKV
PIEIRDVNKEKVVGRVISSTPLAENTNSVTNIELEPPFGDSYIVIGVGNSALTLHWFRK
GSSIGKMFESTYRGAKRMAILGETAWDFGSVGGLFTSLGKAVHQVFGSVYTTMFGG
VSWMIRILIGFLVLWIGTNSRNTSMAMTCIAVGGITLFLGFTVQADMGCVVSWSGRE
LKCGSGIFVVDNVHTWTEQYKFQPESPARLASAILNAHKDGVCGIRSTTRLENVMW
KQITNELNYVLWEGGHDLTVVAGDVKGVLTKGKRALTPPVSDLKYSWKTWGKAKI
FTPEARNSTFLIDGPDTSECPNERRAWNSLEVEDYGFGMFTTNIWMKFREGSSEVCD
HRLMSAAIKDQKAVHADMGYWIESSKNQTWQIEKASLIEVKTCLWPKTHTLWSNG
VLESQMLIPKSYAGPFSQHNYRQGYATQTVGPWHLGKLEIDFGECPGTTVTIQEDCD
HRGPSLRTTTASGKLVTQWCCRSCTMPPLRFLGEDGCWYGMEIRPLSEKEENMVKS
QVTAGQGTSETFSMGLLCLTLFVEECLRRRVTRKHMILVVVITLCAIILGGLTWMDL
LRALIMLGDTMSGRIGGQIHLAIMAVFKMSPGYVLGVFLRKLTSRETALMVIGMAM
TTVLSIPHDLMELIDGISLGLILLKIVTQFDNTQVGTLALSLTFIRSTMPLVMAWRTIM
AVLFVVTLIPLCRTSCLQKQSHWVEITALILGAQALPVYLMTLMKGASRRSWPLNEG
IMAVGLVSLLGSALLKNDVPLAGPMVAGGLLLAAYVMSGSSADLSLEKAANVQWD
EMADITGSSPIIEVKQDEDGSFSIRDVEETNMITLLVKLALITVSGLYPLAIPITMTLWY
MWQVKTQRSGALWDVPSPAATQKAALSEGVYRIMQRGLFGKTQVGVGIHMEGVF
HTMWHVTRGSVICHETGRLEPSWADVRNDMISYGGGWRLGDKWDKEEDVQVLAIE
PGKNPKHVQTKPGLFKTLTGEIGAVTLDFKPGTSGSPIINRKGKVIGLYGNGVVTKSG
DYVSAITQAERIGEPDYEVDEDIFRKKRLTIMDLHPGAGKTKRILPSIVREALKRRLRT
LILAPTRVVAAEMEEALRGLPIRYQTPAVKSEHTGREIVDLMCHATFTTRLLSSTRVP
NYNLIVMDEAHFTDPSSVAARGYISTRVEMGEAAAIFMTATPPGATDPFPQSNSPIEDI
EREIPERSWNTGFDWITDYQGKTVWFVPSIKAGNDIANCLRKSGKKVIQLSRKTFGTE
YPKTKLTDWDFVVTTDISEMGANFRAGRVIDPRRCLKPVILTDGPERVILAGPIPVTP
ASAAQRRGRVGRNPAQEDDQYVFSGDPLKNDEDHAHWTEAKMLLDNIYTPEGIIPT
LFGPEREKTQAIDGEFRLRGEQRKTFVELMRRGDLPVWLSYKVASAGISYKDREWCF
TGERNNQILEENMEVEIWTREGEKKKLRPRWLDARVYADPMALKDFKEFASGRKSI
TLDILTEIASLPAYLSSRAKLALDNIVMLHTTERGGRAYQHALNELPESLETLMLVAL
LGAMTAGIFLFFMQGKGIGKLSMGLITIAVASGLLWIAEIQPQWIAASIILEFFLMVLLI
PEPEKQRTPQDNQLIYVILTVLTIIGLIAANEMGLIEKTKTDFGFYQVKTETTILDVDLR
PASAWTLYAVATTVLTPMLRHTIENTSANLSLAAIANQAAVLMGLGKGWPLHRMD
LGVPLLAMGCYSQVNPTTLTASLVMLFVHYAIIGPGLQAKATREAQKRTAAGIMKN
PTVDGITVIDLEPISYDPKFEKQLGQVMLLVLCAGQLLLMRTTWAFCEVLTLATGPIL
TLWEGNPGRFWNTTIAVSTANIFRGSYLAGAGLAFSLIKNAQTPRRGTGTTGETLGE
KWKRQLNSLDRKEFEEYKRSGILEVDRTEAKSALKDGSKIKHAVSRGSSKIRWIVER
GMVKPKGKVVDLGCGRGGWSYYMATLKNVTEVKGYTKGGPGHEEPIPMATYGWN
LVKLHSGVDVFYKPTEQVDTLLCDIGESSSNPTIEEGRTLRVLKMVEPWLSSKPEFCI
KVLNPYMPTVIEELEKLQRKHGGNLVRCPLSRNSTHEMYWVSGASGNIVSSVNTTSK
MLLNRFTTRHRKPTYEKDVDLGAGTRSVSTETEKPDMTIIGRRLQRLQEEHKETWHY
DQENPYRTWAYHGSYEAPSTGSASSMVNGVVKLLTKPWDVIPMVTQLAMTDTTPF
GQQRVFKEKVDTRTPQPKPGTRMVMTTTANWLWALLGKKKNPRLCTREEFISKVRS
NAAIGAVFQEEQGWTSASEAVNDSRFWELVDKERALHQEGKCESCVYNMMGKREK
KLGEFGRAKGSRAIWYMWLGARFLEFEALGFLNEDHWFGRENSWSGVEGEGLHRL
GYILEEIDKKDGDLMYADDTAGWDTRITEDDLQNEELITEQMAPHHKILAKAIFKLT
YQNKVVKVLRPTPRGAVMDIISRKDQRGSGQVGTYGLNTFTNMEVQLIRQMEAEGV
ITQDDMQNPKGLKERVEKWLRECGVDRLKRMAISGDDCVVKPLDERFGTSLLFLND
MGKVRKDIPQWEPSKGWKNWQEVPFCSHHFHKIFMKDGRSLVVPCRNQDELIGRA
RISQGAGWSLRETACLGKAYAQMWSLMYFHRRDLRLASMAICSAVPTEWFPTSRTT
WSIHAHHQWMTTEDMLKVWNRVWIEDNPNMTDKTPVHSWEDIPYLGKREDLWCG
SLIGLSSRATWAKNIHTAITQVRNLIGKEEYVDYMPVMKRYSAPSESEGVL
Flaviviral E Glycoprotein Epitope Swaps
ZikV Backbone with DENV1 “5J7” Homologous epitope (SEQ ID NO: 13)
IRCIGVSNRDFVEGMSGGTWVDVVLEHGGCVTVMAQDKPTVDIELVTTEVTNPAVL
RKLCIEASISDMASDSRCPTQGEAYLDKQSDTQYVCKRTLVDRGWGNGCGLFGKGS
LVTCAKFACVTKLEGKIVQYENLEYRIMLSVHGSQHSGMIVNDTGHETDENRAKVEI
TPNSPRAEATLGGFGSLGLDCEPRTGLDFSEMVLLTMENKSWLVHKQWFLDLPLPW
TSGASTSTPTWNNKEALVEFKDAHAKRQTVVVLGSQEGAVHTALAGALEIQTSGTT
TIFAGHLKCRLKMDKLRLKGVSYSLCTAAFTFTKIPAETLHGTVTVEVQYAGTDGPC
KVPAQMAVDMQTLTPVGRLITANPVITESTENSKMMLELDPPFGDSYIVIGVGEKKIT
HHWHRSG
ZikV Backbone with DENV2 “5J7” Homologous epitope (SEQ ID NO: 14)
IRCIGVSNRDFVEGMSGGTWVDVVLEHGGCVTVMAQDKPTVDIELVTTEAKQPATL
RKYCIEASISDMASDSRCPTQGEAYLDKQSDTQYVCKRTLVDRGWGNGCGLFGKGS
LVTCAKFACKKNMEGKVVQPENLEYRIMLSVHGSQHSGMIVNDTGHETDENRAKV
EITPNSPRAEATLGGFGSLGLDCEPRTGLDFSEMVLLTMENKAWLVHRQWFLDLPLP
WLPGADTQTPNWNNKEALVEFKDAHAKRQTVVVLGSQEGAVEITALAGALEIQMSS
GNLLFTGHLKCRLKMDKLRLKGVSYSLCTAAFTFTKIPAETLHGTVTVEVQYAGTD
GPCKVPAQMAVDMQTLTPVGRLITANPVITESTENSKMMLELDPPFGDSYIVIGVGE
KKITHHWHRSG
ZikV Backbone with DENV3 5J7 epitope (SEQ ID NO: 15)
IRCIGVSNRDFVEGMSGGTWVDVVLEHGGCVTVMAQDKPTVDIELVTTEATQLATL
RKLCIEGSISDMASDSRCPTQGEAYLDKQSDTQYVCKRTLVDRGWGNGCGLFGKGS
LVTCAKFACLEPIEGKVVQYENLEYRIMLSVHGSQHSGMIVNDTGHETDENRAKVEI
TPNSPRAEATLGGFGSLGLDCEPRTGLDFSEMIILTMKNKAWMVHRQWFFDLPLPW
TSGATTETPTWNNKEALVEFKDAHAKRQTVVVLGSQEGAVHTALAGALEIQNSGGT
SIFAGHLKCRLKMDKLRLKGVSYSLCTAAFTFTKIPAETLHGTVTVEVQYAGTDGPC
KVPAQMAVDMQTLTPVGRLITANPVITESTENSKMMLELDPPFGDSYIVIGVGEKKIT
HHWHRSG
ZikV Backbone with DENV4 “5J7” Homologous epitope (SEQ ID NO: 16)
IRCIGVSNRDFVEGMSGGTWVDVVLEHGGCVTVMAQDKPTVDIELVTTTAKEVALL
RTYCIEASISDMASDSRCPTQGEAYLDKQSDTQYVCKRTLVDRGWGNGCGLFGKGS
LVTCAKFACSGKITGNLVQIENLEYRIMLSVHGSQHSGMIVNDTGHETDENRAKVEI
TPNSPRAEATLGGFGSLGLDCEPRTGLDFSEMILMKMKKKTWLVHKQWFLDLPLPW
TAGADTSEVHWNNKEALVEFKDAHAKRQTVVVLGSQEGAVHTALAGALEVDSGD
GNHMFAGHLKCRLKMDKLRLKGVSYSLCTAAFTFTKIPAETLHGTVTVEVQYAGTD
GPCKVPAQMAVDMQTLTPVGRLITANPVITESTENSKMMLELDPPFGDSYIVIGVGE
KKITHHWHRSG
DENV1 Backbone with 5J7 Homologous ZikV epitope (SEQ ID NO: 17)
MRCVGIGNRDFVEGLSGATWVDVVLEHGSCVTTMAKDKPTLDIELLKTTVSNMAE
VRSYCYEAKISNTTTDSRCPTQGEATLVEEQDTNFVCRRTFVDRGWGNGCGLFGKG
SLITCAKFKCSKKMTGKSIQPENLKYSVIVTVHTGDQHQVGNETTEHGTTATITPQAP
TSEIQLTDYGALTLDCSPRTGLDFNDLYLLTMNNKHWLVHKEWFHDIPLPWHAGAD
TGTPHWNRQDLLVTFKTAHAKKQEVVVLGSQEGAMHTALTGATEAEMDGAKGRL
SSGHLKCRLKMDKLTLKGMSYVMCTGSFKLEKEVAETQHGTVLVQVKYEGTDAPC
KIPFSSQDEKGVTQNGRLITANPIVTDKEKPVNIEAEPPFGESYIVVGAGEKALKLSWF
KK
DENV2 Backbone with 5J7 Homologous ZikV epitope (SEQ ID NO: 18)
MRCIGISNRDFVEGVSGGSWVDIVLEHGSCVTTMAKNKPTLDFELIKTTVSNMAEVR
SYCYEAKLTNTTTESRCPTQGEPSLNEEQDKRFVCKHSMVDRGWGNGCGLFGKGGI
VTCAMFTCSKKMTGKSIQPENLEYTIVVTPHSGEEHAVGNDTGKHGKEIKVTPQSSIT
EAELTGYGTVTMECSPRTGLDFNDLYLLTMNNKHWLVHKEWFHDIPLPWHAGADT
GTPHWIQKETLVTFKNPHAKKQDVVVLGSQEGAMHTALTGATEAEMDGAKGRLSS
GHLKCRLRMDKLQLKGMSYSMCTGKFKVVKEIAETQHGTIVIRVQYEGDGSPCKIPF
EIMDLEKRHVLGRLITVNPIVTEKDSPVNIEAEPPFGDSYIIIGVDPGQLKLNWFKK
DENV3 Backbone with 5J7 Homologous ZikV epitope (SEQ ID NO: 19)
MRCVGIGNRDFVEGLSGATWVDVVLEHGGCVTTMAKNKPTLDIELQKTTVSNMAE
VRSYCYEAKITNITTDSRCPTQGEAVLPEEQDQNYVCKHTYVDRGWGNGCGLFGKG
SLVTCAKFQCSKKMTGKSIQPENLKYTVIITVHTGDQHQVGNETQGVTAEITPQASTT
EAILPEYGTLGLECSPRTGLDFNDLYLLTMNNKHWLVHKEWFHDIPLPWHAGADTG
TPHWNRKELLVTFKNAHAKKQEVVVLGSQEGAMHTALTGATEAEMDGAKGRLSS
GHLKCRLKMDKLELKGMSYAMCTNTFVLKKEVSETQHGTILIKVEYKGEDAPCKIPF
STEDGQGKAHNGRLITANPVVTKKEEPVNIEARREPPFGESNIVIGIGDNALKINWYK
K
DENV4 Backbone with 5J7 Homologous ZikV epitope (SEQ ID NO: 20)
MRCVGVGNRDFVEGVSGGAWVDLVLEHGGCVTTMAQGKPTLDFELTKTTVSNMA
EVRSYCYEASISNITTATRCPTQGEPYLKEEQDQQYICRRDVVDRGWGNGCGLFGKG
GVVTCAKFSCSKKMTGKSIQPENLEYTVVVTVHNGDTHAVGNDTSNHGVTATITPR
SPSVEVKLPDYGELTLDCEPRSGIDFNDLYLLTMNNKHWLVHKEWFHDIPLPWHAG
ADTGTPHWNYKERMVTFKVPHAKRQDVTVLGSQEGAMHSALAGATEAEMDGAKG
RLSSGHLKCKVRMEKLRIKGMSYTMCSGKFSIDKEMAETQHGTTVVKVKYEGAGA
PCKVPIEIRDVNKEKVVGRVISSTPLAENTNSVTNIELEPPFGDSYIVIGVGNSALTLH
WFRK
DENV1 Backbone with EDIII from ZikV (SEQ ID NO: 21)
MRCVGIGNRDFVEGLSGATWVDVVLEHGSCVTTMAKDKPTLDIELLKTEVTNPAVL
RKLCIEAKISNTTTDSRCPTQGEATLVEEQDTNFVCRRTFVDRGWGNGCGLFGKGSLI
TCAKFKCVTKLEGKIVQYENLKYSVIVTVHTGDQHQVGNETTEHGTTATITPQAPTS
EIQLTDYGALTLDCSPRTGLDFNEMVLLTMEKKSWLVHKQWFLDLPLPWTSGASTS
QETWNRQDLLVTFKTAHAKKQEVVVLGSQEGAMHTALTGATEIQTSGTTTIFAGHL
KCRLKMDKLTLKGMSYSLCTAAFTFTKIPAETLHGTVTVEVQYAGTDGPCKVPAQM
AVDMQTLTPVGRLITANPVITESTENSKMMLELDPPFGDSYIVIGVGEKKITHHWHRS
G
DENV2 Backbone with EDIII from ZikV (SEQ ID NO: 22)
MRCIGISNRDFVEGVSGGSWVDIVLEHGSCVTTMAKNKPTLDFELIKTEAKQPATLR
KYCIEAKLTNTTTESRCPTQGEPSLNEEQDKRFVCKHSMVDRGWGNGCGLFGKGGI
VTCAMFTCKKNMEGKVVQPENLEYTIVVTPHSGEEHAVGNDTGKHGKEIKVTPQSSI
TEAELTGYGTVTMECSPRTGLDFNEMVLLQMENKAWLVHRQWFLDLPLPWLPGAD
TQGSNWIQKETLVTFKNPHAKKQDVVVLGSQEGAMHTALTGATEIQMSSGNLLFTG
HLKCRLRMDKLQLKGMSYSLCTAAFTFTKIPAETLHGTVTVEVQYAGTDGPCKVPA
QMAVDMQTLTPVGRLITANPVITESTENSKMMLELDPPFGDSYIVIGVGEKKITHHW
HRSG
DENV3 Backbone with EDIII from ZikV (SEQ ID NO: 23)
MRCVGIGNRDFVEGLSGATWVDVVLEHGGCVTTMAKNKPTLDIELQKTEATQLATL
RKLCIEGKITNITTDSRCPTQGEAVLPEEQDQNYVCKHTYVDRGWGNGCGLFGKGSL
VTCAKFQCLEPIEGKVVQYENLKYTVIITVHTGDQHQVGNETQGVTAEITPQASTTE
AILPEYGTLGLECSPRTGLDFNEMILLTMKNKAWMVHRQWFFDLPLPWTSGATTETP
TWNRKELLVTFKNAHAKKQEVVVLGSQEGAMHTALTGATEIQNSGGTSIFAGHLKC
RLKMDKLELKGMSYSLCTAAFTFTKIPAETLHGTVTVEVQYAGTDGPCKVPAQMAV
DMQTLTPVGRLITANPVITESTENSKMMLELDPPFGDSYIVIGVGEKKITHHWHRSG
DENV4 Backbone with EDIII from ZikV (version 1) (SEQ ID NO: 24)
MRCVGVGNRDFVEGVSGGAWVDLVLEHGGCVTTMAQGKPTLDFELTKTTAKEVA
LLRTYCIEASISNITTATRCPTQGEPYLKEEQDQQYICRRDVVDRGWGNGCGLFGKG
GVVTCAKFSCSGKITGNLVQIENLEYTVVVTVHNGDTHAVGNDTSNHGVTATITPRS
PSVEVKLPDYGELTLDCEPRSGIDFNEMILMKMKKKTWLVHKQWFLDLPLPWTAGA
DTSEVHWNYKERMVTFKVPHAKRQDVTVLGSQEGAMHSALAGATEVDSGDGNHM
FAGHLKCKVRMEKLRIKGVSYSLCTAAFTFTKIPAETLHGTVTVEVQYAGTDGPCKV
PAQMAVDMQTLTPVGRLITANPVITESTENSKMMLELDPPFGDSYIVIGVGEKKITHH
WHRSG
DENV4 Backbone with EDIII from ZikV (version 2) (SEQ ID NO: 97)
MRCVGVGNRDFVEGVSGGAWVDLVLEHGGCVTTMAQGKPTLDFELTKTTAKEVA
LLRTYCIEASISNITTATRCPTQGEPYLKEEQDQQYICRRDVVDRGWGNGCGLFGKG
GVVTCAKFSCSGKITGNLVQIENLEYTVVVTVHNGDTHAVGNDTSNHGVTATITPRS
PSVEVKLPDYGELTLDCEPRSGIDFNEMILMKMKKKTWLVHKQWFLDLPLPWTAGA
DTSEVHWNYKERMVTFKVPHAKRQDVTVLGSQEGAMHSALAGATEVDSGDGNHM
FAGHLKCKVRMEKLRIKGVSYSLCTAAFTFTKIPAETLHGTVTVEVQYAGTDGPCKV
PAQMAVDMQTLTPVGRLITANPVITESTENSKMMLELDPPFGDSYIVIGVGEKKITHH
WHRSG
DENV1 Backbone with ZIKV Z20 Epitope (SEQ ID NO: 25)
MRCVGIGNRDFVEGLSGATWVDVVLEHGSCVTTMAKDKPTLDIELLKTEVTNPAVL
RKLCIEAKISDMATDSRCPTQGEATLVKEQDTNFVCRRTFVDRGWGNGCGLFGKGS
LITCAKFACVTKLEGKIVQYENLKYSVIVTVHTGDQHQVGNETTEHGTTATITPQAPT
SEIQLTDYGALTLDCSPRTGLDFNEMVLLTMENKSWLVHKQWFLDLPLPWTSGAST
GTETWNRQDLLVTFKTAHAKKQEVVVLGSQEGAMHTALTGATEIEMDSGTTTIFAG
HLKCRLKMDKLTLKGMSYVMCTGSFKLEKEVAETQHGTVLVQVKYEGTDAPCKIP
FSSQDEKGVTQNGRLITANPIVTDKEKPVNIEAEPPFGESYIVVGAGEKALKLSWFKK
DENV2 Backbone with ZIKV Z20 Epitope (SEQ ID NO: 26)
MRCIGISNRDFVEGVSGGSWVDIVLEHGSCVTTMAKNKPTLDFELIKTEAKQPATLR
KYCIEAKLTDMATESRCPTQGEPSLNKEQDKRFVCKHSMVDRGWGNGCGLFGKGGI
VTCAMFACKKNMEGKVVQPENLEYTIVVTPHSGEEHAVGNDTGKHGKEIKVTPQSS
ITEAELTGYGTVTMECSPRTGLDFNEMVLLQMENKAWLVHRQWFLDLPLPWLPGA
DTGTSNWIQKETLVTFKNPHAKKQDVVVLGSQEGAMHTALTGATEIEMDSSGNLLF
TGHLKCRLRMDKLQLKGMSYSMCTGKFKVVKEIAETQHGTIVIRVQYEGDGSPCKIP
FEIMDLEKRHVLGRLITVNPIVTEKDSPVNIEAEPPFGDSYIIIGVDPGQLKLNWFKK
DENV3 Backbone with ZIKV Z20 Epitope (SEQ ID NO: 27)
MRCVGIGNRDFVEGLSGATWVDVVLEHGGCVTTMAKNKPTLDIELQKTEATQLATL
RKLCIEGKITDMATDSRCPTQGEAVLPKEQDQNYVCKHTYVDRGWGNGCGLFGKG
SLVTCAKFACLEPIEGKVVQYENLKYTVIITVHTGDQHQVGNETQGVTAEITPQASTT
EAILPEYGTLGLECSPRTGLDFNEMILLTMKNKAWMVHRQWFFDLPLPWTSGATTG
TPTWNRKELLVTFKNAHAKKQEVVVLGSQEGAMHTALTGATEIEMDSGGTSIFAGH
LKCRLKMDKLELKGMSYAMCTNTFVLKKEVSETQHGTILIKVEYKGEDAPCKIPFST
EDGQGKAHNGRLITANPVVTKKEEPVNIEAEPPFGESNIVIGIGDNALKINWYKK
DENV4 Backbone with ZIKV Z20 Epitope (version 1) (SEQ ID NO: 28)
MRCVGVGNRDFVEGVSGGAWVDLVLEHGGCVTTMAQGKPTLDFELTKTTAKEVA
LLRTYCIEASISDMATATRCPTQGEPYLKKEQDQQYICRRDVVDRGWGNGCGLFGK
GGVVTCAKFACSGKITGNLVQIENLEYTVVVTVHNGDTHAVGNDTSNHGVTATITP
RSPSVEVKLPDYGELTLDCEPRSGIDFNEMILMKMKNKTWLVHKQWFLDLPLPWTA
GADTGTVHWNYKERMVTFKVPHAKRQDVTVLGSQEGAMHSALAGATEVEMDGD
GNHMFAGHLKCKVRMEKLRIKGMSYTMCSGKFSIDKEMAETQHGTTVVKVKYEGA
GAPCKVPIEIRDVNKEKVVGRVISSTPLAENTNSVTNIELEPPFGDSYIVIGVGNSALTL
HWFRK
DENV4 Backbone with ZIKV Z20 Epitope (version 2) (SEQ ID NO: 96)
MRCVGVGNRDFVEGVSGGAWVDLVLEHGGCVTTMAQGKPTLDFELTKTTAKEVA
LLRTYCIEASISDMATATRCPTQGEPYLKKEQDQQYICRRDVVDRGWGNGCGLFGK
GGVVTCAKFACSGKITGNLVQIENLEYTVVVTVHNGDTHAVGNDTSNHGVTATITP
RSPSVEVKLPDYGELTLDCEPRSGIDFNEMILMKMKNKTWLVHKQWFLDLPLPWTA
GADTGTVHWNYKERMVTFKVPHAKRQDVTVLGSQEGAMHSALAGATEVEMDGD
GNHMFAGHLKCKVRMEKLRIKGMSYTMCSGKFSIDKEMAETQ
DENV1 Backbone with ZIKV Z3L1 Epitope (SEQ ID NO: 29)
MRCVGIGNRDFVEGLSGATWVDVVLEHGSCVTTMAKDKPTLDIELVTTEVTNPAVL
RKLCIEAKISNTTTDSRCPTQGEATLVEEQDTNFVCRRTFVDRGWGNGCGLFGKGSLI
TCAKFKCVTKLEGKIVQYENLKYRVMVTVHTGDQHQTGHETTEHGTKAEITPQAPT
SEIQLTDYGALTLDCSPRTGLDFNEMVLLTMENKSWLVHKQWFLDLPLPWTSGAST
SQETWNRQDLLVTFKTAHAKKQEVVVLGSQEGAMHTALTGATEIEMDSAKTRIFAG
HLKCRLKMDKLTLKGMSYVMCTGSFKLEKEVAETQHGTVLVQVKYEGTDAPCKIP
FSSQDEKGVTQNGRLITANPIVTDKEKPVNIEAEPPFGESYIVVGAGEKALKLSWFKK
DENV2 Backbone with ZIKV Z3L1 Epitope (SEQ ID NO: 30)
MRCIGISNRDFVEGVSGGSWVDIVLEHGSCVTTMAKNKPTLDFELVTTEAKNPATLR
KYCIEAKLTNTTTESRCPTQGEPSLNEEQDKRFVCKHSMVDRGWGNGCGLFGKGGI
VTCAMFTCKKNMEGKVVQPENLEYRIMVTPHSGEEHATGHETGKHGKKIEVTPQSSI
TEAELTGYGTVTMECSPRTGLDFNEMVLLQMENKAWLVHRQWFLDLPLPWLPGAD
TQGSNWIQKETLVTFKNPHAKKQDVVVLGSQEGAMHTALTGATEIEMDSAKNRLFT
GHLKCRLRMDKLQLKGMSYSMCTGKFKVVKEIAETQHGTIVIRVQYEGDGSPCKIPF
EIMDLEKRHVLGRLITVNPIVTEKDSPVNIEAEPPFGDSYHIGVDPGQLKLNWFKK
DENV3 Backbone with ZIKV Z3L1 Epitope (SEQ ID NO: 31)
MRCVGIGNRDFVEGLSGATWVDVVLEHGGCVTTMAKNKPTLDIELVTTEATNLATL
RKLCIEGKITNITTDSRCPTQGEAVLPEEQDQNYVCKHTYVDRGWGNGCGLFGKGSL
VTCAKFQCLEPIEGKVVQYENLKYRVMITVHTGDQHQTGHETQGVKAEITPQASTTE
AILPEYGTLGLECSPRTGLDFNEMILLTMKNKAWMVHRQWFFDLPLPWTSGATTETP
TWNRKELLVTFKNAHAKKQEVVVLGSQEGAMHTALTGATEIEMDSAKTRIFAGHL
KCRLKMDKLELKGMSYAMCTNTFVLKKEVSETQHGTILIKVEYKGEDAPCKIPFSTE
DGQGKAHNGRLITANPVVTKKEEPVNIEAEPPFGESNIVIGIGDNALKINWYKK
DENV4 Backbone with ZIKV Z3L1 Epitope (SEQ ID NO: 32)
MRCVGVGNRDFVEGVSGGAWVDLVLEHGGCVTTMAQGKPTLDFELVTTTAKNVA
LLRTYCIEASISNITTATRCPTQGEPYLKEEQDQQYICRRDVVDRGWGNGCGLFGKG
GVVTCAKFSCSGKITGNLVQIENLEYRVMVTVHNGDTHATGHETSNHGVKAEITPRS
PSVEVKLPDYGELTLDCEPRSGIDFNEMILMKMKNKTWLVHKQWFLDLPLPWTAGA
DTSEVHWNYKERMVTFKVPHAKRQDVTVLGSQEGAMHSALAGATEVEMDGAKNR
MFAGHLKCKVRMEKLRIKGMSYTMCSGKFSIDKEMAETQHGTTVVKVKYEGAGAP
CKVPIEIRDVNKEKVVGRVISSTPLAENTNSVTNIELEPPFGDSYIVIGVGNSALTLHW
FRK
DENV1 Backbone with ZIKV Z20 and Z3L1 Epitopes (SEQ ID NO: 33)
MRCVGIGNRDFVEGLSGATWVDVVLEHGSCVTTMAKDKPTLDIELVTTEVTNPAVL
RKLCIEAKISDMATDSRCPTQGEATLVKEQDTNFVCRRTFVDRGWGNGCGLFGKGS
LITCAKFACVTKLEGKIVQYENLKYRVMVTVHTGDQHQTGHETTEHGTKAEITPQAP
TSEIQLTDYGALTLDCSPRTGLDFNEMVLLTMENKSWLVHKQWFLDLPLPWTSGAS
TGTETWNRQDLLVTFKTAHAKKQEVVVLGSQEGAMHTALTGATEIEMDSAKTRIFA
GHLKCRLKMDKLTLKGMSYVMCTGSFKLEKEVAETQHGTVLVQVKYEGTDAPCKI
PFSSQDEKGVTQNGRLITANPIVTDKEKPVNIEAEPPFGESYIVVGAGEKALKLSWFK
K
DENV2 Backbone with ZIKV Z20 and Z3L1 Epitopes (SEQ ID NO: 34)
MRCIGISNRDFVEGVSGGSWVDIVLEHGSCVTTMAKNKPTLDFELVTTEAKNPATLR
KYCIEAKLTDMATESRCPTQGEPSLNKEQDKRFVCKHSMVDRGWGNGCGLFGKGGI
VTCAMFACKKNMEGKVVQPENLEYRIMVTPHSGEEHATGHETGKHGKKIEVTPQSS
ITEAELTGYGTVTMECSPRTGLDFNEMVLLQMENKAWLVHRQWFLDLPLPWLPGA
DTGTSNWIQKETLVTFKNPHAKKQDVVVLGSQEGAMHTALTGATEIEMDSAKNRLF
TGHLKCRLRMDKLQLKGMSYSMCTGKFKVVKEIAETQHGTIVIRVQYEGDGSPCKIP
FEIMDLEKRHVLGRLITVNPIVTEKDSPVNIEAEPPFGDSYIIIGVDPGQLKLNWFKK
DENV3 Backbone with ZIKV Z20 and Z3L1 Epitopes (SEQ ID NO: 35)
MRCVGIGNRDFVEGLSGATWVDVVLEHGGCVTTMAKNKPTLDIELVTTEATNLATL
RKLCIEGKITDMATDSRCPTQGEAVLPKEQDQNYVCKHTYVDRGWGNGCGLFGKG
SLVTCAKFACLEPIEGKVVQYENLKYRVMITVHTGDQHQTGHETQGVKAEITPQAST
TEAILPEYGTLGLECSPRTGLDFNEMILLTMKNKAWMVHRQWFFDLPLPWTSGATT
GTPTWNRKELLVTFKNAHAKKQEVVVLGSQEGAMHTALTGATEIEMDSAKTRIFAG
HLKCRLKMDKLELKGMSYAMCTNTFVLKKEVSETQHGTILIKVEYKGEDAPCKIPFS
TEDGQGKAHNGRLITANPVVTKKEEPVNIEAEPPFGESNIVIGIGDNALKINWYKK
DENV4 Backbone with ZIKV Z20 and Z3L1 Epitopes (SEQ ID NO: 36)
MRCVGVGNRDFVEGVSGGAWVDLVLEHGGCVTTMAQGKPTLDFELVTTTAKNVA
LLRTYCIEASISDMATATRCPTQGEPYLKKEQDQQYICRRDVVDRGWGNGCGLFGK
GGVVTCAKFACSGKITGNLVQIENLEYRVMVTVHNGDTHATGHETSNHGVKAEITP
RSPSVEVKLPDYGELTLDCEPRSGIDFNEMILMKMKNKTWLVHKQWFLDLPLPWTA
GADTGTVHWNYKERMVTFKVPHAKRQDVTVLGSQEGAMHSALAGATEVEMDGA
KNRMFAGHLKCKVRMEKLRIKGMSYTMCSGKFSIDKEMAETQHGTTVVKVKYEGA
GAPCKVPIEIRDVNKEKVVGRVISSTPLAENTNSVTNIELEPPFGDSYIVIGVGNSALTL
HWFRK
ZIKV Z20 Epitope Ablation by DENV1 (SEQ ID NO: 37)
IRCIGVSNRDFVEGMSGGTWVDVVLEHGGCVTVMAQDKPTVDIELVTTTVSNMAEV
RSYCYEASISNTTSDSRCPTQGEAYLDEQSDTQYVCKRTLVDRGWGNGCGLFGKGS
LVTCAKFKCSKKMTGKSIQPENLEYRIMLSVHGSQHSGMIVNDTGHETDENRAKVEI
TPNSPRAEATLGGFGSLGLDCEPRTGLDFSDLYYLTMNKKHWLVHKEWFHDIPLPW
HAGADTSQPHWNNKEALVEFKDAHAKRQTVVVLGSQEGAVHTALAGALEAQTDG
AKGRLSSGHLKCRLKMDKLRLKGVSYSLCTAAFTFTKIPAETLHGTVTVEVQYAGT
DGPCKVPAQMAVDMQTLTPVGRLITANPVITESTENSKMMLELDPPFGDSYIVIGVG
EKKITHHWHRSG
ZIKV Z20 Epitope Ablation by DENV2 (SEQ ID NO: 38)
IRCIGVSNRDFVEGMSGGTWVDVVLEHGGCVTVMAQDKPTVDIELVTTTVSNMAEV
RSYCYEASISNTTSDSRCPTQGEAYLDEQSDTQYVCKRTLVDRGWGNGCGLFGKGS
LVTCAKFTCSKKMTGKSIQPENLEYRIMLSVHGSQHSGMIVNDTGHETDENRAKVEI
TPNSPRAEATLGGFGSLGLDCEPRTGLDFSDLYYLTMNNKHWLVHKEWFHDIPLPW
HAGADTQGPHWNNKEALVEFKDAHAKRQTVVVLGSQEGAVHTALAGALEAQMDG
AKGRLSSGHLKCRLKMDKLRLKGVSYSLCTAAFTFTKIPAETLHGTVTVEVQYAGT
DGPCKVPAQMAVDMQTLTPVGRLITANPVITESTENSKMMLELDPPFGDSYIVIGVG
EKKITHHWHRSG
ZIKV Z20 Epitope Ablation by DENV3 (SEQ ID NO: 39)
IRCIGVSNRDFVEGMSGGTWVDVVLEHGGCVTVMAQDKPTVDIELVTTTVSNMAEV
RSYCYEASISNITSDSRCPTQGEAYLDEQSDTQYVCKRTLVDRGWGNGCGLFGKGSL
VTCAKFQCSKKMTGKSIQPENLEYRIMLSVHGSQHSGMIVNDTGHETDENRAKVEIT
PNSPRAEATLGGFGSLGLDCEPRTGLDFSDLYYLTMNNKHWLVHKEWFHDIPLPWH
AGADTETPHWNNKEALVEFKDAHAKRQTVVVLGSQEGAVHTALAGALEAQNDGA
KGRLSSGHLKCRLKMDKLRLKGVSYSLCTAAFTFTKIPAETLHGTVTVEVQYAGTD
GPCKVPAQMAVDMQTLTPVGRLITANPVITESTENSKMMLELDPPFGDSYIVIGVGE
KKITHHWHRSG
ZIKV Z20 Epitope Ablation by DENV4 (SEQ ID NO: 40)
IRCIGVSNRDFVEGMSGGTWVDVVLEHGGCVTVMAQDKPTVDIELVTTTVSNMAEV
RSYCYEASISNITSDSRCPTQGEAYLDEQSDTQYVCKRTLVDRGWGNGCGLFGKGSL
VTCAKFSCSKKMTGKSIQPENLEYRIMLSVHGSQHSGMIVNDTGHETDENRAKVEIT
PNSPRAEATLGGFGSLGLDCEPRTGLDFSDLYYLTMNKKHWLVHKEWFHDIPLPWH
AGADTSEPHWNNKEALVEFKDAHAKRQTVVVLGSQEGAVHTALAGALEADSDGA
KGRLSSGHLKCRLKMDKLRLKGVSYSLCTAAFTFTKIPAETLHGTVTVEVQYAGTD
GPCKVPAQMAVDMQTLTPVGRLITANPVITESTENSKMMLELDPPFGDSYIVIGVGE
KKITHHWHRSG
ZIKV Z3L1 Epitope Ablation by DENV1 (SEQ ID NO: 41)
IRCIGVSNRDFVEGMSGGTWVDVVLEHGGCVTVMAQDKPTVDIELLKTTVSNMAEV
RSYCYEASISDMASDSRCPTQGEAYLDKQSDTQYVCKRTLVDRGWGNGCGLFGKGS
LVTCAKFACSKKMTGKSIQPENLEYSIILSVHGSQHSGMIVNDVGNETDENRATVTIT
PNSPRAEATLGGFGSLGLDCEPRTGLDFSDLYYLTMNKKHWLVHKEWFHDIPLPWH
AGADTGTPHWNNKEALVEFKDAHAKRQTVVVLGSQEGAVHTALAGALEAQTDGG
TGTLSSGHLKCRLKMDKLRLKGVSYSLCTAAFTFTKIPAETLHGTVTVEVQYAGTDG
PCKVPAQMAVDMQTLTPVGRLITANPVITESTENSKMMLELDPPFGDSYIVIGVGEK
KITHHWHRSG
ZIKV Z3L1 Epitope Ablation by DENV2 (SEQ ID NO: 42)
IRCIGVSNRDFVEGMSGGTWVDVVLEHGGCVTVMAQDKPTVDIELIKTTVSQMAEV
RSYCYEASISDMASDSRCPTQGEAYLDKQSDTQYVCKRTLVDRGWGNGCGLFGKGS
LVTCAKFACSKKMTGKSIQPENLEYTIVLSVHGSQHSGMIVNDVGNDTDENRAEVKI
TPNSPRAEATLGGFGSLGLDCEPRTGLDFSDLYYLTMNNKHWLVHKEWFHDIPLPW
HAGADTGTPHWNNKEALVEFKDAHAKRQTVVVLGSQEGAVHTALAGALEAQMDG
SGGLLSSGHLKCRLKMDKLRLKGVSYSLCTAAFTFTKIPAETLHGTVTVEVQYAGTD
GPCKVPAQMAVDMQTLTPVGRLITANPVITESTENSKMMLELDPPFGDSYIVIGVGE
KKITHHWHRSG
ZIKV Z3L1 Epitope Ablation by DENV3 (SEQ ID NO: 43)
IRCIGVSNRDFVEGMSGGTWVDVVLEHGGCVTVMAQDKPTVDIELQKTTVSQMAE
VRSYCYEASISDMASDSRCPTQGEAYLDKQSDTQYVCKRTLVDRGWGNGCGLFGK
GSLVTCAKFACSKKMTGKSIQPENLEYTIILSVHGSQHSGMIVNDVGNETDENRATV
EITPNSPRAEATLGGFGSLGLDCEPRTGLDFSDLYYLTMNNKHWLVHKEWFHDIPLP
WHAGADTGTPHWNNKEALVEFKDAHAKRQTVVVLGSQEGAVHTALAGALEAQND
GGGGSLSSGHLKCRLKMDKLRLKGVSYSLCTAAFTFTKIPAETLHGTVTVEVQYAGT
DGPCKVPAQMAVDMQTLTPVGRLITANPVITESTENSKMMLELDPPFGDSYIVIGVG
EKKITHHWHRSG
ZIKV Z3L1 Epitope Ablation by DENV4 (SEQ ID NO: 44)
IRCIGVSNRDFVEGMSGGTWVDVVLEHGGCVTVMAQDKPTVDIELTKTTVSEMAEV
RSYCYEASISDMASDSRCPTQGEAYLDKQSDTQYVCKRTLVDRGWGNGCGLFGKGS
LVTCAKFACSKKMTGKSIQPENLEYTIVLSVHGSQHSGMIVNDVGNDTDENRATVTI
TPNSPRAEATLGGFGSLGLDCEPRTGLDFSDLYYLTMNKKHWLVHKEWFHDIPLPW
HAGADTGTPHWNNKEALVEFKDAHAKRQTVVVLGSQEGAVHTALAGALEADSDG
DGGHLSSGHLKCRLKMDKLRLKGVSYSLCTAAFTFTKIPAETLHGTVTVEVQYAGT
DGPCKVPAQMAVDMQTLTPVGRLITANPVITESTENSKMMLELDPPFGDSYIVIGVG
EKKITHHWHRSG
ZIKV Z20 and Z3L1 Epitope Ablation by DENV1 (SEQ ID NO: 45)
IRCIGVSNRDFVEGMSGGTWVDVVLEHGGCVTVMAQDKPTVDIELLKTTVSNMAEV
RSYCYEASISNTTSDSRCPTQGEAYLDEQSDTQYVCKRTLVDRGWGNGCGLFGKGS
LVTCAKFKCSKICMTGKSIQPENLEYSIILSVHGSQHSGMIVNDVGNETDENRATVTIT
PNSPRAEATLGGFGSLGLDCEPRTGLDFSDLYYLTMNKKHWLVHKEWFHDIPLPWH
AGADTSQPHWNNKEALVEFKDAHAKRQTVVVLGSQEGAVHTALAGALEAQTDGG
TGTLSSGHLKCRLKMDKLRLKGVSYSLCTAAFTFTKIPAETLHGTVTVEVQYAGTDG
PCKVPAQMAVDMQTLTPVGRLITANPVITESTENSKMMLELDPPFGDSYIVIGVGEK
KITHHWHRSG
ZIKV Z20 and Z3L1 Epitope Ablation by DENV2 (SEQ ID NO: 46)
IRCIGVSNRDFVEGMSGGTWVDVVLEHGGCVTVMAQDKPTVDIELIKTTVSQMAEV
RSYCYEASISNTTSDSRCPTQGEAYLDEQSDTQYVCKRTLVDRGWGNGCGLFGKGS
LVTCAKFTCSKKMTGKSIQPENLEYTIVLSVHGSQHSGMIVNDVGNDTDENRAEVKI
TPNSPRAEATLGGFGSLGLDCEPRTGLDFSDLYYLTMNNKHWLVHKEWFHDIPLPW
HAGADTQTPHWNNKEALVEFKDAHAKRQTVVVLGSQEGAVHTALAGALEAQMDG
SGGLLSSGHLKCRLKMDKLRLKGVSYSLCTAAFTFTKIPAETLHGTVTVEVQYAGTD
GPCKVPAQMAVDMQTLTPVGRLITANPVITESTENSKMMLELDPPFGDSYIVIGVGE
KKITHHWHRSG
ZIKV Z20 and Z3L1 Epitope Ablation by DENV3 (SEQ ID NO: 47)
IRCIGVSNRDFVEGMSGGTWVDVVLEHGGCVTVMAQDKPTVDIELQKTTVSQMAE
VRSYCYEASISNTSDSRCPTQGEAYLDEQSDTQYVCKRTLVDRGWGNGCGLFGKGS
LVTCAKFQCSKKMTGKSIQPENLEYTIILSVHGSQHSGMIVNDVGNETDENRATVEIT
PNSPRAEATLGGFGSLGLDCEPRTGLDFSDLYYLTMNNKHWLVHKEWFHDIPLPWH
AGADTETPHWNNKEALVEFKDAHAKRQTVVVLGSQEGAVHTALAGALEAQNDGG
GGSLSSGHLKCRLKMDKLRLKGVSYSLCTAAFTFTKIPAETLHGTVTVEVQYAGTDG
PCKVPAQMAVDMQTLTPVGRLITANPVITESTENSKMMLELDPPFGDSYIVIGVGEK
KITHHWHRSG
ZIKV Z20 and Z3L1 Epitope Ablation by DENV4 (SEQ ID NO: 48)
IRCIGVSNRDFVEGMSGGTWVDVVLEHGGCVTVMAQDKPTVDIELTKTTVSEMAEV
RSYCYEASISNITSDSRCPTQGEAYLDEQSDTQYVCKRTLVDRGWGNGCGLFGKGSL
VTCAKFSCSKKMTGKSIQPENLEYTIVLSVHGSQHSGMIVNDVGNDTDENRATVTIT
PNSPRAEATLGGFGSLGLDCEPRTGLDFSDLYYLTMNKKHWLVHKEWFHDIPLPWH
AGADTSEPHWNNKEALVEFKDAHAKRQTVVVLGSQEGAVHTALAGALEADSDGD
GGHLSSGHLKCRLKMDKLRLKGVSYSLCTAAFTFTKIPAETLHGTVTVEVQYAGTD
GPCKVPAQMAVDMQTLTPVGRLITANPVITESTENSKMMLELDPPFGDSYIVIGVGE
KKITHHWHRSG
ZIKV E Glycoprotein WT (SEQ ID NO: 49)
IRCIGVSNRDFVEGMSGGTWVDVVLEHGGCVTVMAQDKPTVDIELVTTTVSNMAEV
RSYCYEASISDMASDSRCPTQGEAYLDKQSDTQYVCKRTLVDRGWGNGCGLFGKGS
LVTCAKFACSKKMTGKSIQPENLEYRIMLSVHGSQHSGMIVNDTGHETDENRAKVEI
TPNSPRAEATLGGFGSLGLDCEPRTGLDFSDLYYLTMNNKHWLVHKEWFHDIPLPW
HAGADTGTPHWNNKEALVEFKDAHAKRQTVVVLGSQEGAVHTALAGALEAEMDG
AKGRLSSGHLKCRLKMDKLRLKGVSYSLCTAAFTFTKIPAETLHGTVTVEVQYAGT
DGPCKVPAQMAVDMQTLTPVGRLITANPVITESTENSKMMLELDPPFGDSYIVIGVG
EKKITHHWHRSG
ZIKV EDE1 Null Mutant- Core (SEQ ID NO: 50)
IRCIGVSNRDFVEGMSGGTWVDVVLEHGGCVTVMAQDKPTVDIELVTTTVSNMAEV
RSYCYEASISDMESRAKCPTQGEAYLDKQSDTQYVCKRTLVDRGWDSGCGLFGKGS
LVTCAKFACSKKMTGKSIQPENLEYRIMLSVHGSQHSGMIVNDTGHETDENRAKVEI
TPNSPRAEATLGGFGSLGLDCEPRTGLDFSDLYYLTMNNKHWLVHKEWFHDIPLPW
HAGADTGTPHWNNKEALVEFKDAHATYIPVVVLGSQEGAVHTALAGALEAEMDGA
KGRLSSGHLKCRLKMDKLRLKGVSYSLCTAAFTFTKIPAETLHGTVTVEVQYAGTD
GPCKVPAQMAVDMQTLTPVGRLITANPVITESTENSKMMLELDPPFGDSYIVIGVGE
KKITHHWHRSG
ZIKV EDE1 Null Mutant- Core and Specific (SEQ ID NO: 51)
IHCIGVSNRDFVEGMSGGTWVDVVLEHDGCVTVMAQDKPTVDITVVTTTVSNMAE
VRSYCYEASISDMESRAKCPTAGEAYIDKQSDTQYVCKRTLVDRGWDSGCFLFGKG
SLVTCAKFACSKKMTGKSIQPENLEYRIMLSVHGSQNSGKIVNDTGHETDEKRAKVE
ITPNSPRAEATLGGFGSLGLDCEPRTGLDFSDLYYLTMNNKHWLVHKEWFHDIPLPW
HAGADTGTPHWNNKEALVEFKDAHATYIPVVVLGSQEGAVHTALAGALEAKMDG
AKGRLSSGHLKCRLKMDKLRLKGVSYSLCTAAFTFTSGPAETLHGTVTVLVGYAGT
DGPCKVPAQMAVDMQTLTPVGRLITANPVITESTENSKMMLELDPPFGDSYIVIGVG
EKKITHHWHRSG
ZIKV EDE1 Null Mutant- Specific (SEQ ID NO: 52)
IHCIGVSNRDFVEGMSGGTWVDVVLEHDGCVTVMAQDKPTVDITVVTTTVSNMAE
VRSYCYEASTSDMASDSRCPTAGEAYIDKQSDTQYVCKRTLVDRGWGNGCFLFGKG
SLVTCAKFACSKKMTGKSIQPENLEYRIMLSVHGSQNSGKIVNDTGHETDEKRAKVE
ITPNSPRAEATLGGFGSLGLDCEPRTGLDFSDLYYLTMNNKHWLVHKEWFHDIPLPW
HAGADTGTPHWNNKEALVEFKDAHAKRQTVVVLGSQEGAVHTALAGALEAKMDG
AKGRLSSGHLKCRLKMDKLRLKGVSYSLCTAAFTFTSGPAETLHGTVTVLVGYAGT
DGPCKVPAQMAVDMQTLTPVGRLITANPVITESTENSKMMLELDPPFGDSYIVIGVG
EKKITHHWHRSG
DENV1 E Protein WT (SEQ ID NO: 53)
MRCVGIGNRDFVEGLSGATWVDVVLEHGSCVTTMAKDKPTLDIELLKTEVTNPAVL
RKLCIEAKISNTTTDSRCPTQGEATLVEEQDTNFVCRRTFVDRGWGNGCGLFGKGSLI
TCAKFKCVTKLEGKIVQYENLKYSVIVTVHTGDQHQVGNETTEHGTTATITPQAPTS
EIQLTDYGALTLDCSPRTGLDFNEMVLLTMEKKSWLVHKQWFLDLPLPWTSGASTS
QETWNRQDLLVTFKTAHAKKQEVVVLGSQEGAMHTALTGATEIQTSGTTTIFAGHL
KCRLKMDKLTLKGMSYVMCTGSFKLEKEVAETQHGTVLVQVKYEGTDAPCKIPFSS
QDEKGVTQNGRLITANPIVTDKEKPVNIEAEPPFGESYIVVGAGEKALKLSWFKK
DENV1 EDE1 Null Mutant- Core (SEQ ID NO: 54)
MRCVGIGNRDFVEGLSGATWVDVVLEHGSCVTTMAKDKPTLDIELLKTEVTNPAVL
RKLCIEAKISNTETRAKCPTQGEATLVEEQDTNFVCRRTFVDRGWDSGCGLFGKGSLI
TCAKFKCVTKLEGKIVQYENLKYSVIVTVHTGDQHQVGNETTEHGTIATITPQAPTSE
IQLTDYGALTLDCSPRTGLDFNEMVLLTMKKKSWLVHKQWFLDLPLPWTSGASTSQ
ETWNRQDLLVTFKTAHATYIPVVVLGSQEGAMHTALTGATEIQTSGTTTIFAGHLKC
RLKMDKLTLKGMSYVMCTGSFKLEKEVAETQHGTVLVQVKYEGTDAPCKIPFSSQD
EKGVTQNGRLITANPIVTDKEKPVNIEAEPPFGESYIVVGAGEKALKLSWFKK
DENV1 EDE1 Null Mutant- Core and Specific (SEQ ID NO: 55)
MHCVGIGNRDFVEGLSGATWVDVVLEHDSCVTTMAKDKPTLDITVLKTEVTNPAVL
RKLCIEAKISNTETRAKCPTAGEATIVEEQDTNFVCRRTFVDRGWDSGCFLFGKGSLI
TCAKFKCVTKLEGKIVQYENLKYSVIVTVHTGDNHKVGNETTEKGTIATITPQAPTSE
IQLTDYGALTLDCSPRTGLDFNEMVLLTMKKKSWLVHKQWFLDLPLPWTSGASTSQ
ETWNRQDLLVTFKTAHATYIPVVVLGSQEGAMHTALTGATEIKTSGTTTIFAGHLKC
RLKMDKLTLKGMSYVMCTGSFKLESGVAETQHGTVLVLVGYEGTDAPCKIPFSSQD
EKGVTQNGRLITANPIVTDKEKPVNIEAEPPFGESYIVVGAGEKALKLSWFKK
DENV1 EDE1 Null Mutant- Specific (SEQ ID NO: 56)
MHCVGIGNRDFVEGLSGATWVDVVLEHDSCVTTMAKDKPTLDITVLKTEVTNPAVL
RKLCIEAKISNTTTDSRCPTAGEATIVEEQDTNFVCRRTFVDRGWGNGCFLFGKGSLI
TCAKGKCVTKLEGKIVQYENLKYSVIVTVHTGDNHKVGNETTEKGTIATITPQAPTSE
IQLTDYGALTLDCSPRTGLDFNEMVLLTMKKKSWLVHKQWFLDLPLPWTSGASTSQ
ETWNRQDLLVTFKTAHAKKQEVVVLGSQEGAMHTALTGATEIKTSGTTTIFAGHLK
CRLKMDKLTLKGMSYVMCTGSFKLESGVAETQHGTVLVLVGYEGTDAPCKIPFSSQ
DEKGVTQNGRLITANPIVTDKEKPVNIEAEPPFGESYIVVGAGEKALKLSWFKK
DENV2 EDE1 Null Mutant- Core (SEQ ID NO: 57)
MRCIGISNRDFVEGVSGGSWVDIVLEHGSCVTTMAKNKPTLDFELIKTEAKQPATLR
KYCIEAKLTNTETRAKCPTQGEPSLNEEQDKRFVCKHSMVDRGWDSGCGLFGKGGI
VTCAMFTCKKNMEGKVVQPENLEYTIVVTPHSGEEHAVGNDTGKHGKIIKVTPQSSI
TEAELTGYGTVTMECSPRTGLDFNEMVLLQMKNKAWLVHRQWFLDLPLPWLPGAD
TQGSNWIQKETLVTFKNPHATYIPVVVLGSQEGAMHTALTGATEIQMSSGNLLFTGH
LKCRLRMDKLQLKGMSYSMCTGKFKVVKEIAETQHGTIVIRVQYEGDGSPCKIPFEI
MDLEKRHVLGRLITVNPIVTEKDSPVNIEAEPPFGDSYIIIGVDPGQLKLNWFKK
DENV2 EDE1 Null Mutant- Core and Specific (SEQ ID NO: 58)
MHCIGISNRDFVEGVSGGSWVDIVLEHDSCVTTMAKNKPTLDFTVIKTEAKQPATLR
KYCIEAKLTNTETRAKCPTAGEPSINEEQDKRFVCKEISMVDRGWDSGCFLFGKGGIV
TCAMFTCKKNMEGKVVQPENLEYTIVVTPHSGENHKVGNDTGKKGKIIKVTPQSSIT
EAELTGYGTVTMECSPRTGLDFNEMVLLQMKNKAWLVHRQWFLDLPLPWLPGADT
QGSNWIQKETLVTFKNPHATYIPVVVLGSQEGAMHTALTGATEIKMSSGNLLFTGHL
KCRLRMDKLQLKGMSYSMCTGKFKVVSGIAETQHGTIVILVGYEGDGSPCKIPFEIM
DLEKRHVLGRLITVNPIVTEKDSPVNIEAEPPFGDSYIIIGVDPGQLKLNWFKK
DENV2 EDE1 Null Mutant- Specific (SEQ ID NO: 59)
MHCIGISNRDFVEGVSGGSWVDIVLEHDSCVTTMAKNKPTLDFTVIKTEAKQPATLR
KYCIEAKLTNTTTESRCPTAGEPSINEEQDKRFVCKHSMVDRGWGNGCFLFGKGGIV
TCAMFTCKKNMEGKVVQPENLEYTIVVTPHSGENHKVGNDTGKKGKIIKVTPQSSIT
EAELTGYGTVTMECSPRTGLDFNEMVLLQMKNKAWLVHRQWFLDLPLPWLPGADT
QGSNWIQKETLVTFKNPHAKKQDVVVLGSQEGAMHTALTGATEIKMSSGNLLFTGH
LKCRLRMDKLQLKGMSYSMCTGKFKVVSGIAETQHGTIVILVGYEGDGSPCKIPFEI
MDLEKRHVLGRLITVNPIVTEKDSPVNIEAEPPFGDSYIIIGVDPGQLKLNWFKK
DENV3 EDE1 Null Mutant- Core (SEQ ID NO: 60)
MRCVGIGNRDFVEGLSGATWVDVVLEHGGCVTTMAKNKPTLDIELQKTEATQLATL
RKLCIEGKITNIETRAKCPTQGEAVLPEEQDQNYVCKHTYVDRGWDSGCGLFGKGSL
VTCAKFQCLEPIEGKVVQYENLKYTVIITVHTGDQHQVGNETQGVIAEITPQASTTEA
ILPEYGTLGLECSPRTGLDFNEMILLTMKNKAWMVHRQWFFDLPLPWTSGATTETPT
WNRKELLVTFKNAHATYIPVVVLGSQEGAMHTALTGATEIQNSGGTSIFAGHLKCRL
KMDKLELKGMSYAMCTNTFVLKKEVSETQHGTILIKVEYKGEDAPCKIPFSTEDGQG
KAHNGRLITANPVVTKKEEPVNIEAEPPFGESNIVIGIGDNALKINWYKK
DENV3 EDE1 Null Mutant- Core and Specific (SEQ ID NO: 61)
MHCVGIGNRDFVEGLSGATWVDVVLEHDGCVTTMAKNKPTLDITVQKTEATQLAT
LRKLCIEGKITNIETRAKCPTAGEAVIPEEQDQNYVCKHTYVDRGWDSGCFLFGKGS
LVTCAKFQCLEPIEGKVVQYENLKYTVIITVHTGDNHKVGNETKGVIAEITPQASTTE
AILPEYGTLGLECSPRTGLDFNEMILLTMKNKAWMVHRQWFFDLPLPWTSGATTETP
TWNRKELLVTFKNAHATYIPVVVLGSQEGAMHTALTGATEIKNSGGTSIFAGHLKCR
LKMDKLELKGMSYAMCTNTFVLKSGVSETQHGTILILVGYKGEDAPCKIPFSTEDGQ
GKAHNGRLITANPVVTKKEEPVNIEAEPPFGESNIVIGIGDNALKINWYKK
DENV3 EDE1 Null Mutant- Specific (SEQ ID NO: 62)
MHCVGIGNRDFVEGLSGATWVDVVLEHDGCVTTMAKNKPTLDITVQKTEATQLAT
LRKLCIEGKITNITTDSRCPTAGEAVIPEEQDQNYVCICHTYVDRGWGNGCFLFGKGS
LVTCAKFQCLEPIEGKVVQYENLKYTVIITVHTGDNHKVGNETKGVIAEITPQASTTE
AILPEYGTLGLECSPRTGLDFNEMILLTMKNKAWMVHRQWFFDLPLPWTSGATTETP
TWNRKELLVTFKNAHAKKQEVVVLGSQEGAMHTALTGATEIKNSGGTSIFAGHLKC
RLKMDKLELKGMSYAMCTNTFVLKSGVSETQHGTILILVGYKGEDAPCKIPFSTEDG
QGKAHNGRLITANPVVTKKEEPVNIEAEPPFGESNIVIGIGDNALKINWYKK
DENV4 EDE1 Null Mutant- Core (SEQ ID NO: 63)
MRCVGVGNRDFVEGVSGGAWVDLVLEHGGCVTTMAQGKPTLDFELTKTTAKEVA
LLRTYCIEASISNIETRAKCPTQGEPYLKEEQDQQYICRRDVVDRGWDSGCGLFGKG
GVVTCAKFSCSGKITGNLVQIENLEYTVVVTVHNGDTHAVGNDTSNHGVIATITPRS
PSVEVKLPDYGELTLDCEPRSGIDFNEMILMKMKKKTWLVHKQWFLDLPLPWTAGA
DTSEVHWNYKERMVTFKVPHATYIPVTVLGSQEGAMHSALAGATEVDSGDGNHMF
AGHLKCKVRMEKLRIKGMSYTMCSGKFSIDKEMAETQHGTTVVKVKYEGAGAPCK
VPIEIRDVNKEKVVGRVISSTPLAENTNSVTNIELEPPFGDSYIVIGVGNSALTLHWFR
K
DENV4 EDE1 Null Mutant- Core and Specific (SEQ ID NO: 64)
MHCVGVGNRDFVEGVSGGAWVDLVLEHDGCVTTMAQGKPTLDFTVTKTTAKEVA
LLRTYCIEASISNIETRAKCPTAGEPYIKEEQDQQYICRRDVVDRGWDSGCFLFGKGG
VVTCAKFSCSGKITGNLVQIENLEYTVVVTVHNGDNHKVGNDTSNKGVIATITPRSPS
VEVKLPDYGELTLDCEPRSGIDFNEMILMKMKKKTWLVHKQWFLDLPLPWTAGAD
TSEVHWNYKERMVTFKVPHATYIPVTVLGSQEGAMHSALAGATEVKSGDGNHMFA
GHLKCKVRMEKLRIKGMSYTMCSGKFSIDSGMAETQHGTTVVLVGYEGAGAPCKV
PIEIRDVNKEKVVGRVISSTPLAENTNSVTNIELEPPFGDSYIVIGVGNSALTLHWFRK
DENV4 EDE1 Null Mutant- Specific (SEQ ID NO: 65)
MHCVGVGNRDFVEGVSGGAWVDLVLEHDGCVTTMAQGKPTLDFTVTKTTAKEVA
LLRTYCIEASISNITTATRCPTAGEPYIKEEQDQQYICRRDVVDRGWGNGCFLFGKGG
VVTCAKFSCSGKITGNLVQIENLEYTVVVTVHNGDNHKVGNDTSNKGVIATITPRSPS
VEVKLPDYGELTLDCEPRSGIDFNEMILMKMKKKTWLVHKQWFLDLPLPWTAGAD
TSEVHWNYKERMVTFKVPHAKRQDVTVLGSQEGAMHSALAGATEVKSGDGNHMF
AGHLKCKVRMEKLRIKGMSYTMCSGKFSIDSGMAETQHGTTVVLVGYEGAGAPCK
VPIEIRDVNKEKVVGRVISSTPLAENTNSVTNIELEPPFGDSYIVIGVGNSALTLHWFR
K
Zika and Dengue EDE1 Epitope Swaps (C10 and C8)
ZIKV with DENV1 C10 Epitope (SEQ ID NO: 66)
IRCIGVSNRDFVEGMSGGTWVDVVLEHGGCVTVMAQDKPTVDIELLKTTVSNMAV
VRSYCYEASISNTTTDSRCPTQGEATLVEQSDTQYVCKRTLVDRGWGNGCGLFGKG
SLVTCAKFACSKKMTGKSIQPENLEYSIILSVHGSQQSGMIVNQTGHETDENGAKVEI
TPNSPRAEATLTDFGALGLDCEPRTGLDFSDLYYLTMNNKHWLVHKEWFHDIPLPW
HAGASTGTPHWNNKEALVEFKDAHAKKQEVVVLGSQEGAVHTALAGALEAQTSG
AKGTLSSGHLKCRLKMDKLTLKGVSYSLCTAAFTFEKIPAETLHGTVTVQVKYAGT
DGPCKVPAQMAVDMQTLTPVGRLITANPVITESEENKPMMLELDPPFGDSYIVIGVG
EKKITHHWHRSG
ZIKV with DENV2 C10 Epitope (SEQ ID NO: 67)
IRCIGVSNRDFVEGMSGGTWVDVVLEHGGCVTVMAQDKPTVDIELIKTTVSQMATV
RSYCYEASISNTTTESRCPTQGEASLNEQSDTQYVCKRTLVDRGWGNGCGLFGKGSI
VTCAKFACSKKMTGKSIQPENLEYTIVLSVHGSQESGMIVNATGHETDENGAKVEIT
PNSPRAEATLTGFGTLGLDCEPRTGLDFSDLYYLTMNNKHWLVHKEWFHDIPLPWH
AGADTGTPHWNNKEALVEFKDAHAKKQDVVVLGSQEGAVHTALAGALEAQMSSA
KGLLSSGHLKCRLKMDKLQLKGVSYSLCTAAFTFVKIPAETLHGTVTVRVQYAGTD
GPCKVPAQMAVDMQTLTPVGRLITANPVITESDENSPMMLELDPPFGDSYIVIGVGE
KKITHHWHRSG
ZIKV with DENV3 C10 Epitope (SEQ ID NO: 68)
IRCIGVSNRDFVEGMSGGTWVDVVLEHGGCVTVMAQDKPTVDIELQKTTVSQMAT
VRSYCYEASISNITTDSRCPTQGEAVLPEQSDTQYVCKRTLVDRGWGNGCGLFGKGS
LVTCAKFACSKKMTGKSIQPENLEYTIILSVHGSQQSGMIVNQTGHETDENGAKVEIT
PNSPRAEATLPEFGTLGLDCEPRTGLDFSDLYYLTMNNKHWLVHKEWFHDIPLPWH
AGATTGTPHWNNKEALVEFKDAHAKKQEVVVLGSQEGAVHTALAGALEAQNSGA
KGSLSSGHLKCRLKMDKLELKGVSYSLCTAAFTFKKIPAETLHGTVTVKVEYAGTD
GPCKVPAQMAVDMQTLTPVGRLITANPVITESEENEPMMLELDPPFGDSYIVIGVGE
KKITHHWHRSG
ZIKV with DENV4 C10 Epitope (SEQ ID NO: 69)
IRCIGVSNRDFVEGMSGGTWVDVVLEHGGCVTVMAQDKPTVDIELTKTTVSEMALV
RSYCYEASISNITTATRCPTQGEAYLKEQSDTQYVCKRTLVDRGWGNGCGLFGKGS
VVTCAKFACSKKMTGKSIQPENLEYTIVLSVHGSQTSGMIVNATGHETDENGAKVEI
TPNSPRAEATLPDFGELGLDCEPRTGLDFSDLYYLTMNNKHWLVHKEWFHDIPLPW
HAGADTGTPHWNNKEALVEFKDAHAKRQDVVVLGSQEGAVHTALAGALEADSGD
AKGHLSSGHLKCRLKMDKLRLKGVSYSLCTAAFTFDKIPAETLHGTVTVKVKYAGT
DGPCKVPAQMAVDMQTLTPVGRLITANPVITESNENSVMMLELDPPFGDSYIVIGVG
EKKITHHWHRSG
ZIKV with DENV1 C10 Epitope- Non-neurotropic (SEQ ID NO: 70)
IRCIGVSNRDFVEGMSGGTWVDVVLEHGGCVTVMAQDKPTVDIELLKTTVSNMAV
VRSYCYEASISNTTTDSRCPTQGEATLVEQSDTQYVCKRTLVDRGWGNGCGLFGKG
SLVTCAKFACSKKMTGKSIQPENLEYSIILSVHGSQQNQTGHETDENGAKVEITPNSP
RAEATLTDFGALGLDCEPRTGLDFSDLYYLTMNNKHWLVHKEWFHDIPLPWHAGA
STGTPHWNNKEALVEFKDAHAKKQEVVVLGSQEGAVHTALAGALEAQTSGAKGTL
SSGHLKCRLKMDKLTLKGVSYSLCTAAFTFEKIPAETLHGTVTVQVKYAGTDGPCK
VPAQMAVDMQTLTPVGRLITANPVITESEENKPMMLELDPPFGDSYIVIGVGEKKITH
HWHRSG
ZIKV with DENV2 C10 Epitope- Non-neurotropic (SEQ ID NO: 71)
IRCIGVSNRDFVEGMSGGTWVDVVLEHGGCVTVMAQDKPTVDIELIKTTVSQMATV
RSYCYEASISNTTTESRCPTQGEASLNEQSDTQYVCKRTLVDRGWGNGCGLFGKGSI
VTCAKFACSKKMTGKSIQPENLEYTIVLSVHGSQENATGHETDENGAKVEITPNSPR
AEATLTGFGTLGLDCEPRTGLDFSDLYYLTMNNKHWLVHKEWFHDIPLPWHAGAD
TGTPHWNNKEALVEFKDAHAKKQDVVVLGSQEGAVHTALAGALEAQMSSAKGLL
SSGHLKCRLKMDKLQLKGVSYSLCTAAFTFVKIPAETLHGTVTVRVQYAGTDGPCK
VPAQMAVDMQTLTPVGRLITANPVITESDENSPMMLELDPPFGDSYIVIGVGEKKITH
HWHRSG
ZIKV with DENV3 C10 Epitope- Non-neurotropic (SEQ ID NO: 72)
IRCIGVSNRDFVEGMSGGTWVDVVLEHGGCVTVMAQDICPTVDIELQKTTVSQMAT
VRSYCYEASISNITTDSRCPTQGEAVLPEQSDTQYVCKRTLVDRGWGNGCGLFGKGS
LVTCAKFACSKKMTGKSIQPENLEYTIILSVHGSQQNQTGHETDENGAKVEITPNSPR
AEATLPEFGTLGLDCEPRTGLDFSDLYYLTMNNKHWLVHKEWFHDIPLPWHAGATT
GTPHWNNKEALVEFKDAHAKKQEVVVLGSQEGAVHTALAGALEAQNSGAKGSLSS
GHLKCRLKMDKLELKGVSYSLCTAAFTFKKIPAETLHGTVTVKVEYAGTDGPCKVP
AQMAVDMQTLTPVGRLITANPVITESEENEPMMLELDPPFGDSYIVIGVGEKKITHH
WHRSG
ZIKV with DENV4 C10 Epitope- Non-neurotropic (SEQ ID NO: 73)
IRCIGVSNRDFVEGMSGGTWVDVVLEHGGCVTVMAQDKPTVDIELTKTTVSEMALV
RSYCYEASISNITTATRCPTQGEAYLKEQSDTQYVCKRTLVDRGWGNGCGLFGKGS
VVTCAKFACSKKMTGKSIQPENLEYTIVLSVHGSQTNATGHETDENGAKVEITPNSP
RAEATLPDFGELGLDCEPRTGLDFSDLYYLTMNNKHWLVHKEWFHDIPLPWHAGA
DTGTPHWNNKEALVEFKDAHAKRQDVVVLGSQEGAVHTALAGALEADSGDAKGH
LSSGHLKCRLKMDKLRLKGVSYSLCTAAFTFDKIPAETLHGTVTVKVKYAGTDGPC
KVPAQMAVDMQTLTPVGRLITANPVITESNENSVMMLELDPPFGDSYIVIGVGEKKIT
HHWHRSG
ZIKV with DENV1 C8 Epitope (SEQ ID NO: 74)
IRCIGVSNRDFVEGMSGGTWVDVVLEHGGCVTVMAQDKPTVDIELVTTTVSNMAEV
RSYCYEASISNTTTDSRCPTQGEAYLVEQSDTQYVCKRTLVDRGWGNGCGLFGKGS
LVTCAKFACSKKMTGKSIQPENLEYRIMLSVHGSQQSGMIVNDTGHETDEHRAKVEI
TPNSPRAEATLGGFGSLGLDCEPRTGLDFSDLYYLTMNNKHWLVHKEWFHDIPLPW
HAGADTGTPHWNNKEALVEFKDAHAKKQEVVVLGSQEGAVHTALAGALEAEMSG
AKGRLSSGHLKCRLKMDKLRLKGVSYSLCTAAFTFEKEPAETLHGTVTVQVKYAGT
DGPCKVPAQMAVDMQTLTPVGRLITANPVITESTENSKMMLELDPPFGDSYIVIGVG
EKKITHHWHRSG
ZIKV with DENV2 C8 Epitope (SEQ ID NO: 75)
IRCIGVSNRDFVEGMSGGTWVDVVLEHGGCVTVMAQDKPTVDIELVTTTVSNMAEV
RSYCYEASISNTTTESRCPTQGEAYLNEQSDTQYVCKRTLVDRGWGNGCGLFGKGSI
VTCAKFACSKKMTGKSIQPENLEYRIMLSVHGSQESGMIVNDTGHETDEHRAKVEIT
PNSPRAEATLGGFGSLGLDCEPRTGLDFSDLYYLTMNNKHWLVHKEWFHDIPLPWH
AGADTGTPHWNNKEALVEFKDAHAKKQDVVVLGSQEGAVHTALAGALEAEMSSA
KGRLSSGHLKCRLKMDKLRLKGVSYSLCTAAFTFVKEPAETLHGTVTVRVQYAGTD
GPCKVPAQMAVDMQTLTPVGRLITANPVITESTENSKMMLELDPPFGDSYIVIGVGE
KKITHHWHRSG
ZIKV with DENV3 C8 Epitope (SEQ ID NO: 76)
IRCIGVSNRDFVEGMSGGTWVDVVLEHGGCVTVMAQDKPTVDIELVTTTVSNMAEV
RSYCYEASISNITTDSRCPTQGEAYLPEQSDTQYVCKRTLVDRGWGNGCGLFGKGSL
VTCAKFACSKKMTGKSIQPENLEYRIMLSVHGSQQSGMIVNDTGHETDEQRAKVEIT
PNSPRAEATLGGFGSLGLDCEPRTGLDFSDLYYLTMNNKHWLVHKEWFHDIPLPWH
AGADTGTPHWNNKEALVEFKDAHAKKQEVVVLGSQEGAVHTALAGALEAEMSGA
KGRLSSGHLKCRLKMDKLRLKGVSYSLCTAAFTFKKEPAETLHGTVTVKVEYAGTD
GPCKVPAQMAVDMQTLTPVGRLITANPVITESTENSKMMLELDPPFGDSYIVIGVGE
KKITHHWHRSG
ZIKV with DENV4 C8 Epitope (SEQ ID NO: 77)
IRCIGVSNRDFVEGMSGGTWVDVVLEHGGCVTVMAQDKPTVDIELVTTTVSNMAEV
RSYCYEASISNITTATRCPTQGEAYLKEQSDTQYVCKRTLVDRGWGNGCGLFGKGS
VVTCAKFACSKKMTGKSIQPENLEYRIMLSVHGSQTSGMIVNDTGHETDEHRAKVEI
TPNSPRAEATLGGFGSLGLDCEPRTGLDFSDLYYLTMNNKHWLVHKEWFHDIPLPW
HAGADTGTPHWNNKEALVEFKDAHAKRQDVVVLGSQEGAVHTALAGALEAEMGD
AKGRLSSGHLKCRLKMDKLRLKGVSYSLCTAAFTFDKEPAETLHGTVTVKVKYAGT
DGPCKVPAQMAVDMQTLTPVGRLITANPVITESTENSKMMLELDPPFGDSYIVIGVG
EKKITHHWHRSG
DENV1 E glycoprotein with ZIKV C10 (SEQ ID NO: 78)
MRCVGIGNRDFVEGLSGATWVDVVLEHGSCVTTMAKDKPTLDIELVTTEVTNPAEL
RICLCIEAKISDMASDSRCPTQGEAYLDKEQDTNFVCRRTFVDRGWGNGCGLFGKGS
LITCAKFKCVTKLEGKIVQYENLKYRVMVTVHTGDHHDVGNETTEHRTTATITPQAP
TSEIQLGGYGSLTLDCSPRTGLDFNEMVLLTMEKKSWLVHKQWFLDLPLPWTSGAD
TSQETWNRQDLLVTFKTAHAKRQTVVVLGSQEGAMHTALTGATEIEMDGTTRIFAG
HLKCRLKMDKLRLKGMSYVMCTGSFKLTKEVAETQHGTVLVEVQYEGTDAPCKIPF
SSQDEKGVTQNGRLITANPIVTDKTSKVNIEAEPPFGESYIVVGAGEKALKLSWFKK
DENV2 E glycoprotein with ZIKV C10 (SEQ ID NO: 79)
MRCIGISNRDFVEGVSGGSWVDIVLEHGSCVTTMAKNKPTLDFELVTTEAKNPAELR
KYCIEAKLTDMASDSRCPTQGEPYLDKEQDKRFVCKHSMVDRGWGNGCGLFGKGG
LVTCAMFTCKKNMEGKVVQPENLEYRIMVTPHSGEHHDVGNDTGKHRKEIKVTPQS
SITEAELGGYGSVTMECSPRTGLDFNEMVLLQMENKAWLVHRQWFLDLPLPWLPG
ADTQGSNWIQKETLVTFKNPHAKRQTVVVLGSQEGAMHTALTGATEIEMDGGNRLF
TGHLKCRLRMDKLRLKGMSYSMCTGKFKVTKEIAETQHGTIVIEVQYEGDGSPCKIP
FEIMDLEKRHVLGRLITVNPIVTEKTSKVNIEAEPPFGDSYIIIGVDPGQLKLNWFKK
DENV3 E glycoprotein with ZIKV C10 (SEQ ID NO: 80)
MRCVGIGNRDFVEGLSGATWVDVVLEHGGCVTTMAKNKPTLDIELVTTEATNLAEL
RKLCIEGKITDMASDSRCPTQGEAYLDKEQDQNYVCKHTYVDRGWGNGCGLFGKG
SLVTCAKFQCLEPIEGKVVQYENLKYRVMITVHTGDHHDVGNETQRVTAEITPQAST
TEAILGGYGSLGLECSPRTGLDFNEMILLTMKNKAWMVHRQWFFDLPLPWTSGADT
ETPTWNRKELLVTFKNAHAKRQTVVVLGSQEGAMHTALTGATEIEMDGGTRIFAGH
LKCRLKMDKLRLKGMSYAMCTNTFVLTKEVSETQHGTILIEVQYKGEDAPCKIPFST
EDGQGKAHNGRLITANPVVTKKTSKVNIEAEPPFGESNIVIGIGDNALKINWYKK
DENV4 E glycoprotein with ZIKV C10 (SEQ ID NO: 81)
MRCVGVGNRDFVEGVSGGAWVDLVLEHGGCVTTMAQGKPTLDFELVTTTAKNVA
ELRTYCIEASISDMASDSRCPTQGEPYLDKEQDQQYICRRDVVDRGWGNGCGLFGK
GGLVTCAKFSCSGKITGNLVQIENLEYRVMVTVHNGDHHDVGNDTSNHRVTATITP
RSPSVEVKLGGYGSLTLDCEPRSGIDFNEMILMKMKKKTWLVHKQWFLDLPLPWTA
GADTSEVHWNYKERMVTFKVPHAKRQTVTVLGSQEGAMHSALAGATEVEMDGGN
RMFAGHLKCKVRMEKLRIKGMSYTMCSGKFSITKEMAETQHGTTVVEVQYEGAGA
PCKVPIEIRDVNKEKVVGRVISSTPLAENTTSKTNIELEPPFGDSYIVIGVGNSALTLH
WFRK
DENV1 E glycoprotein with ZIKV C10- Neurotropic insertions (SEQ ID NO: 82)
MRCVGIGNRDFVEGLSGATWVDVVLEHGSCVTTMAKDKPTLDIELVTTEVTNPAEL
RKLCIEAKISDMASDSRCPTQGEAYLDKEQDTNFVCRRTFVDRGWGNGCGLFGKGS
LITCAKFKCVTKLEGKIVQYENLKYRVMVTVHTGDHSGMIVHDVGNETTEHRTTATI
TPQAPTSEIQLGGYGSLTLDCSPRTGLDFNEMVLLTMEKKSWLVHKQWFLDLPLPW
TSGADTSQETWNRQDLLVTFKTAHAKRQTVVVLGSQEGAMHTALTGATEIEMDGT
TGRIFAGHLKCRLKMDKLRLKGMSYVMCTGSFKLTKEVAETQHGTVLVEVQYEGT
DAPCKIPFSSQDEKGVTQNGRLITANPIVTDKTENSKVNIEAEPPFGESYIVVGAGEKA
LKLSWFKK
DENV2 E glycoprotein with ZIKV C10- Neurotropic insertions (SEQ ID NO: 83)
MRCIGISNRDFVEGVSGGSWVDIVLEHGSCVTTMAKNKPTLDFELVTTEAKNPAELR
KYCIEAKLTDMASDSRCPTQGEPYLDKEQDKRFVCKHSMVDRGWGNGCGLFGKGG
LVTCAMFTCKKNMEGKVVQPENLEYRIMVTPHSGEHSGMIVHDVGNDTGKHRKEI
KVTPQSSITEAELGGYGSVTMECSPRTGLDFNEMVLLQMENKAWLVHRQWFLDLPL
PWLPGADTQGSNWIQKETLVTFKNPHAKRQTVVVLGSQEGAMHTALTGATEIEMD
GGNGRLFTGHLKCRLRMDKLRLKGMSYSMCTGKFKVTKEIAETQHGTIVIEVQYEG
DGSPCKIPFEIMDLEKRHVLGRLITVNPIVTEKTENSKVNIEAEPPFGDSYIIIGVDPGQ
LKLNWFKK
DENV3 E glycoprotein with ZIKV C10- Neurotropic insertions (SEQ ID NO: 84)
MRCVGIGNRDFVEGLSGATWVDVVLEHGGCVTTMAKNKPTLDIELVTTEATNLAEL
RKLCIEGKITDMASDSRCPTQGEAYLDKEQDQNYVCKHTYVDRGWGNGCGLFGKG
SLVTCAKFQCLEPIEGKVVQYENLKYRVMITVHTGDHSGMIVHDVGNETQRVTAEIT
PQASTTEAILGGYGSLGLECSPRTGLDFNEMILLTMKNKAWMVHRQWFFDLPLPWT
SGADTETPTWNRKELLVTFKNAHAKRQTVVVLGSQEGAMHTALTGATEIEMDGGT
GRIFAGHLKCRLKMDKLRLKGMSYAMCTNTFVLTKEVSETQHGTILIEVQYKGEDA
PCKIPFSTEDGQGKAHNGRLITANPVVTKKTENSKVNIEAEPPFGESNIVIGIGDNALKI
NWYKK
DENV4 E glycoprotein with ZIKV C10- Neurotropic insertions (SEQ ID NO: 85)
MRCVGVGNRDFVEGVSGGAWVDLVLEHGGCVTTMAQGKPTLDFELVTTTAKNVA
ELRTYCIEASISDMASDSRCPTQGEPYLDKEQDQQYICRRDVVDRGWGNGCGLFGK
GGLVTCAKFSCSGKITGNLVQIENLEYRVMVTVHNGDHSGMIVHDVGNDTSNHRVT
ATITPRSPSVEVKLGGYGSLTLDCEPRSGIDFNEMILMKMKKKTWLVHKQWFLDLPL
PWTAGADTSEVHWNYKERMVTFKVPHAKRQTVTVLGSQEGAMHSALAGATEVEM
DGGNGRMFAGHLKCKVRMEKLRIKGMSYTMCSGKFSITKEMAETQHGTTVVEVQY
EGAGAPCKVPIEIRDVNKEKVVGRVISSTPLAENTTENSKTNIELEPPFGDSYIVIGVG
NSALTLHWFRK
DENV1 E glycoprotein with ZIKV C8 (SEQ ID NO: 86)
MRCVGIGNRDFVEGLSGATWVDVVLEHGSCVTTMAKDKPTLDIELLKTEVTNPAVL
RKLCIEAKISDMASDSRCPTQGEATLDKEQDTNFVCRRTFVDRGWGNGCGLFGKGS
LITCAKFKCVTKLEGKIVQYENLKYSVIVTVHTGDHHQVGNETTENGTTATITPQAPT
SEIQLTDYGALTLDCSPRTGLDFNEMVLLTMEKKSWLVHKQWFLDLPLPWTSGAST
SQETWNRQDLLVTFKTAHAKRQTVVVLGSQEGAMHTALTGATEIQTDGTTTIFAGH
LKCRLKMDKLTLKGMSYVMCTGSFKLTKIVAETQHGTVLVEVQYEGTDAPCKIPFS
SQDEKGVTQNGRLITANPIVTDKEKPVNIEAEPPFGESYIVVGAGEKALKLSWFKK
DENV2 E glycoprotein with ZIKV C8 (SEQ ID NO: 87)
MRCIGISNRDFVEGVSGGSWVDIVLEHGSCVTTMAKNKPTLDFELIKTEAKQPATLR
KYCIEAKLTDMASDSRCPTQGEPSLDKEQDKRFVCKHSMVDRGWGNGCGLFGKGG
LVTCAMFTCKKNMEGKVVQPENLEYTIVVTPHSGEHHAVGNDTGKNGKEIKVTPQS
SITEAELTGYGTVTMECSPRTGLDFNEMVLLQMENKAWLVHRQWFLDLPLPWLPGA
DTQGSNWIQKETLVTFKNPHAKRQTVVVLGSQEGAMHTALTGATEIQMDGGNLLFT
GHLKCRLRMDKLQLKGMSYSMCTGKFKVTKIIAETQHGTIVIEVQYEGDGSPCKIPF
EIMDLEKRHVLGRLITVNPIVTEKDSPVNIEAEPPFGDSYIIIGVDPGQLKLNWFKK
DENV3 E glycoprotein with ZIKV C8 (SEQ ID NO: 88)
MRCVGIGNRDFVEGLSGATWVDVVLEHGGCVTTMAKNKPTLDIELQKTEATQLATL
RKLCIEGKITDMASDSRCPTQGEAYLDKEQDQNYVCKHTYVDRGWGNGCGLFGKG
SLVTCAKFQCLEPIEGKVVQYENLKYTVIITVHTGDHHQVGNETNGVTAEITPQASTT
EAILPEYGTLGLECSPRTGLDFNEMILLTMKNKAWMVHRQWFFDLPLPWTSGATTE
TPTWNRKELLVTFKNAHAKRQTVVVLGSQEGAMHTALTGATEIQNDGGTSIFAGHL
KCRLKMDKLELKGMSYAMCTNTFVLTKEVSETQHGTILIEVQYKGEDAPCKIPFSTE
DGQGKAHNGRLITANPVVTKKEEPVNIEAEPPFGESNIVIGIGDNALKINWYKK
DENV4 E glycoprotein with ZIKV C8 (SEQ ID NO: 89)
MRCVGVGNRDFVEGVSGGAWVDLVLEHGGCVTTMAQGKPTLDFELTKTTAKEVA
LLRTYCIEASISDMASDSRCPTQGEPYLDKEQDQQYICRRDVVDRGWGNGCGLFGK
GGLVTCAKFSCSGKITGNLVQIENLEYTVVVTVHNGDHHAVGNDTSNNGVTATITPR
SPSVEVKLPDYGELTLDCEPRSGIDFNEMILMKMKKKTWLVHKQWFLDLPLPWTAG
ADTSEVHWNYKERMVTFKVPHAKRQTVTVLGSQEGAMHSALAGATEVDSDGGNH
MFAGHLKCKVRMEKLRIKGMSYTMCSGKFSITKIMAETQHGTTVVEVQYEGAGAPC
KVPIEIRDVNKEKVVGRVISSTPLAENTNSVTNIELEPPFGDSYIVIGVGNSALTLHWF
RK

TABLE 1
Amino Acid Diversity Among DENV and ZIKV Strains in EDE1 and EDE2
Contact Residues

| | N-Linked | | | | | ZIKV | ZIKV | EDE1 | EDE1 | EDE2 |
|---|---|---|---|---|---|---|---|---|---|---|
| Position | Glycosylation | DENV-1 | DENV-2 | DENV-3 | DENV-4 | H/PF/2013 | PRVABC59 | C8 | C10 | B7 |
| 2 | | R | R | R | R | R | R | | Yes | |
| 27 | | H | H | H | H | H | H | | Yes | |
| 28 | | G | G | G | G | G | G | | Yes | |
| 44 | | E | E | E | E | E | E | | Yes | |
| 45 | | L | L | L | L | L | L | | Yes | |
| 46 | | L | I | Q | T | V | V | | Yes | |
| 47 | | K | K | K | K | T | T | | Yes | |
| 67 | Yes (DENV | N | N | N | N | D | D | Yes | Yes | Yes |
| | Only) | | | | | | | | | |
| 68 | | T | T | I | I | M | M | Yes | Yes | Yes |
| 69 | | T | T | T | T | A | A | Yes | Yes | Yes |
| 70 | | T | T | T | T | S | S | Yes | Yes | Yes |
| 71 | | D | E | D | A | D | D | Yes | Yes | Yes |
| 72 | | S | S | S | T | S | S | Yes | Yes | Yes |
| 73 | | R | R | R | R | R | R | Yes | Yes | Yes |
| 74 | | C | C | C | C | C | C | Yes | Yes | Yes |
| 77 | | Q | Q | Q | Q | Q | Q | Yes | Yes | |
| 81 | | T | S | V | Y | Y | Y | | Yes | |
| 82 | | L | L | L | L | L | L | | Yes | |
| 83 | | V | N | P | K | D | D | Yes | Yes | Yes |
| 84 | | E | E | E | E | K | K | Yes | Yes | |
| 97 | | V | V | V | V | V | V | Yes | Yes | Yes |
| 98 | | D | D | D | D | D | D | Yes | Yes | Yes |
| 99 | | R | R | R | R | R | R | Yes | Yes | Yes |
| 101 | | W | W | W | W | W | W | Yes | Yes | Yes |
| 102 | | G | G | G | G | G | G | Yes | Yes | Yes |
| 103 | | N | N | N | N | N | N | Yes | Yes | Yes |
| 104 | | G | G | G | G | G | G | Yes | Yes | Yes |
| 105 | | C | C | C | C | C | C | Yes | Yes | |
| 106 | | G | G | G | G | G | G | Yes | Yes | |
| 113 | | L | I | L | V | L | L | Yes | Yes | Yes |
| 115 | | T | T | T | T | T | T | | Yes | |
| 148 | | Q | E | Q | T | H | H | Yes | | |
| 151 | | Q | A | Q | A | M | M | ? | ? | |
| 152 | | V | V | V | V | I | I | ? | ? | |
| 153 | | G | G | G | G | V | V | ? | ? | Yes |
| 154 | Yes (DENV & | N | N | N | N | N | N | ? | ? | Yes |
| | ZIKV) | | | | | | | | | |
| 155 | | E | D | E | D | D | D | ? | ? | Yes |
| 156 | | T | T | T | T | T | T | ? | ? | Yes |
| 157 | | T | G | — | S | G | G | ? | ? | Yes |
| 163 | | H | H | Q | H | N | N | Yes | | |
| 251 | | K | K | K | K | K | K | Yes | Yes | Yes |
| 252 | | K | K | K | R | R | R | Yes | Yes | Yes |
| 253 | | Q | Q | Q | Q | Q | Q | Yes | Yes | Yes |
| 254 | | E | D | E | D | T | T | Yes | Yes | Yes |
| 276 | | Q | Q | Q | D | E | E | | Yes | |
| 278 | | S | S | S | G | D | D | Yes | Yes | |
| 279 | | G | S | G | D | G | G | Yes | Yes | |
| 315 | | E | V | K | D | T | T | Yes | Yes | |
| 316 | | K | K | K | K | K | K | Yes | Yes | |
| 317 | | E | E | E | E | I | I | Yes | | |
| 329 | | Q | R | K | K | E | E | Yes | Yes | |
| 331 | | K | Q | E | K | Q | Q | | Yes | |
| 371 | | E | D | E | N | N | N | Yes | Yes | |

TABLE 2
Characteristics of Human Plasma and Sera Used in Neutralization Assays

| Serum Classification | Serum ID | Location | Year of Infection | Year of Collection |
|---|---|---|---|---|
| Primary DENV-1 | DT145 | South America | 2005 | Spring 2016 |
| Primary DENV-1 | DT147 | South America | Fall 2015 | Spring 2016 |
| Primary DENV-1 | DT153 | South America | 2010 | End 2014 |
| Primary DENV-1 | SS05/262 | Asia | Unknown | Unknown |
| Primary DENV-1 | SS99/1230 | Asia | Unknown | Unknown |
| Primary DENV-2 | DT001 | Asia | 1996 | Spring 2016 |
| Primary DENV-2 | DT155 | South America | 2000 | Spring 2015 |
| Primary DENV-2 | SS08/90 | Asia | Unknown | Unknown |
| Primary DENV-2 | SS08/91 | Asia | Unknown | Unknown |
| Primary DENV-3 | DT115 | Asia | Unknown | Winter 2009 |
| Primary DENV-3 | DT118 | South America | 2009 | Fall 2010 |
| Primary DENV-3 | DT125 | South America | 2007 | Spring 2012 |
| Primary DENV-3 | DT133 | South America | 2002 | Summer 2012 |
| Primary DENV-3 | SS06/297 | Asia | Unknown | Unknown |
| Primary DENV-4 | GS0239 | Unknown | Unknown | Unknown |
| Primary DENV-4 | SS06/105 | Asia | Unknown | Unknown |
| Primary DENV-4 | SS06/302 | Asia | Unknown | Unknown |
| Secondary DENV | DT000 | Asia | <1982 | Spring 2016 |
| Secondary DENV | DT112 | South America | 2001 | Spring 2009 |
| Secondary DENV | DT116 | Asia | Unknown | Fall 2009 |
| Secondary DENV | DT141 | South America | 2006 | Fall 2014 |
| Secondary DENV | DT146 | Asia | 2013 | Fall 2014 |
| Secondary DENV | DT160 | South America | 2015 | Summer 2015 |
| Secondary DENV | DV003 | Asia | Unknown | Unknown |
| Secondary DENV | DT144 | Asia | Unknown | Unknown |
| Secondary DENV | SS06/123 | Asia | Unknown | Unknown |
| Secondary DENV | SS06/124 | Asia | Unknown | Unknown |
| Secondary DENV | SS06/125 | Asia | Unknown | Unknown |
| Secondary DENV | SS09/157 | Asia | Unknown | Unknown |
| Secondary DENV | SS09/159 | Asia | Unknown | Unknown |
| Secondary DENV | SS09/165 | Asia | Unknown | Unknown |
| Secondary DENV | SS09/250 | Asia | Unknown | Unknown |
| Secondary DENV | SS09/251 | Asia | Unknown | Unknown |

TABLE 3

| | Abbreviation | |
|---|---|---|
| Amino Acid Residue | Three-Letter Code | One-Letter Code |
| Alanine | Ala | A |
| Arginine | Arg | R |
| Asparagine | Asn | N |
| Aspartic acid (Aspartate) | Asp | D |
| Cysteine | Cys | C |
| Glutamine | Gln | Q |
| Glutamic acid (Glutamate) | Glu | E |
| Glycine | Gly | G |
| Histidine | His | H |
| Isoleucine | Ile | I |
| Leucine | Leu | L |
| Lysine | Lys | K |
| Methionine | Met | M |
| Phenylalanine | Phe | F |
| Proline | Pro | P |
| Serine | Ser | S |
| Threonine | Thr | T |
| Tryptophan | Trp | W |
| Tyrosine | Tyr | Y |
| Valine | Val | V |

TABLE 4

| | |
|---|---|
| Modified Amino Acid Residue | Abbreviation |

Amino Acid Residue Derivatives

| | |
|---|---|
| 2-Aminoadipic acid | Aad |
| 3-Aminoadipic acid | bAad |
| beta-Alanine, beta-Aminoproprionic acid | bAla |
| 2-Aminobutyric acid | Abu |
| 4-Aminobutyric acid, Piperidinic acid | 4Abu |
| 6-Aminocaproic acid | Acp |
| 2-Aminoheptanoic acid | Ahe |
| 2-Aminoisobutyric acid | Aib |
| 3-Aminoisobutyric acid | bAib |
| 2-Aminopimelic acid | Apm |
| t-butylalanine | t-BuA |
| Citrulline | Cit |
| Cyclohexylalanine | Cha |
| 2,4-Diaminobutyric acid | Dbu |
| Desmosine | Des |
| 2,2′-Diaminopimelic acid | Dpm |
| 2,3-Diaminoproprionic acid | Dpr |
| N-Ethylglycine | EtGly |
| N-Ethylasparagine | EtAsn |
| Homoarginine | hArg |
| Homocysteine | hCys |
| Homoserine | hSer |
| Hydroxylysine | Hyl |
| Allo-Hydroxylysine | aHyl |
| 3-Hydroxyproline | 3Hyp |
| 4-Hydroxyproline | 4Hyp |
| Isodesmosine | Ide |
| allo-Isoleucine | alle |
| Methionine sulfoxide | MSO |
| N-Methylglycine, sarcosine | MeGly |
| N-Methylisoleucine | MeIle |
| 6-N-Methyllysine | MeLys |
| N-Methylvaline | MeVal |
| 2-Naphthylalanine | 2-Nal |
| Norvaline | Nva |
| Norleucine | Nle |
| Ornithine | Orn |
| 4-Chlorophenylalanine | Phe(4-Cl) |
| 2-Fluorophenylalanine | Phe(2-F) |
| 3-Fluorophenylalanine | Phe(3-F) |
| 4-Fluorophenylalanine | Phe(4-F) |
| Phenylglycine | Phg |
| Beta-2-thienylalanine | Thi |

TABLE 5
ZIKV EDE1 null

| | Residue # | | | | | | | | | | | |
|---|---|---|---|---|---|---|---|---|---|---|---|---|
| | 2 | 28 | 44 | 45 | 69 | 71 | 72 | 73 | 77 | 82 | 102 | 103 |
| Zika WT | R | G | E | L | A | D | S | R | Q | L | G | N |
| Core | R | G | E | L | E | R | A | K | Q | L | D | S |
| Core & | H | D | T | V | E | R | A | K | A | I | D | S |
| Specific | | | | | | | | | | | | |
| Specific | H | D | T | V | A | D | S | R | A | I | G | N |

| | Residue # | | | | | | | | | | | | |
|---|---|---|---|---|---|---|---|---|---|---|---|---|---|
| | 106 | 148 | 151 | 163 | 251 | 252 | 253 | 254 | 276 | 316 | 317 | 329 | 331 |
| Zika WT | G | H | M | N | K | R | Q | T | E | K | I | E | Q |
| Core | G | H | M | N | T | Y | I | P | E | K | I | E | Q |
| Core & | F | N | K | K | T | Y | I | P | K | S | G | L | G |
| Specific | | | | | | | | | | | | | |
| Specific | F | N | K | K | K | R | Q | T | K | S | G | L | G |

TABLE 6
DENV1 EDE1 null

| | Residue # | | | | | | | | | | | | |
|---|---|---|---|---|---|---|---|---|---|---|---|---|---|
| | 2 | 28 | 44 | 45 | 69 | 71 | 72 | 73 | 77 | 82 | 102 | 103 | 106 |
| DENV1 WT | R | G | E | L | T | D | S | R | Q | L | G | N | G |
| Core | R | G | E | L | E | R | A | K | Q | L | D | S | G |
| Core & | H | D | T | V | E | R | A | K | A | I | D | S | F |
| Specific | | | | | | | | | | | | | |
| Specific | H | D | T | V | T | D | S | R | A | I | G | N | F |

| | Residue # | | | | | | | | | | | | | |
|---|---|---|---|---|---|---|---|---|---|---|---|---|---|---|
| | 148 | 150 | 158 | 161 | 202 | 246 | 247 | 248 | 249 | 271 | 310 | 311 | 323 | 325 |
| DENV1 WT | Q | Q | H | T | E | K | K | Q | E | Q | K | E | Q | K |
| Core | Q | Q | H | I | K | T | Y | I | P | Q | K | E | Q | K |
| Core & | N | K | K | I | K | T | Y | I | P | K | S | G | L | G |
| Specific | | | | | | | | | | | | | | |
| Specific | N | K | K | I | K | K | K | Q | E | K | S | G | L | G |

TABLE 7
DENV2 EDE1 null

| | Residue # | | | | | | | | | | | | |
|---|---|---|---|---|---|---|---|---|---|---|---|---|---|
| | 2 | 28 | 44 | 45 | 69 | 71 | 72 | 73 | 77 | 82 | 102 | 103 | 106 |
| DENV2 WT | R | G | E | L | T | E | S | R | Q | L | G | N | G |
| Core | R | G | E | L | E | R | A | K | Q | L | D | S | G |
| Core & | H | D | T | V | E | R | A | K | A | I | D | S | F |
| Specific | | | | | | | | | | | | | |
| Specific | H | D | T | V | T | E | S | R | A | I | G | N | F |

| | Residue # | | | | | | | | | | | | | |
|---|---|---|---|---|---|---|---|---|---|---|---|---|---|---|
| | 148 | 150 | 158 | 161 | 202 | 246 | 247 | 248 | 249 | 271 | 310 | 311 | 323 | 325 |
| DENV2 WT | E | A | H | E | E | K | K | Q | D | Q | K | E | R | Q |
| Core | E | A | H | I | K | T | Y | I | P | Q | K | E | R | Q |
| Core & | N | K | K | I | K | T | Y | I | P | K | S | G | L | G |
| Specific | | | | | | | | | | | | | | |
| Specific | N | K | K | I | K | K | K | Q | D | K | S | G | L | G |

TABLE 8
DENV3 EDE1 null

| | Residue # | | | | | | | | | | | | |
|---|---|---|---|---|---|---|---|---|---|---|---|---|---|
| | 2 | 28 | 44 | 45 | 69 | 71 | 72 | 73 | 77 | 82 | 102 | 103 | 106 |
| DENV3 WT | R | G | E | L | T | D | S | R | Q | L | G | N | G |
| Core | R | G | E | L | E | R | A | K | Q | L | D | S | G |
| Core & | H | D | T | V | E | R | A | K | A | I | D | S | F |
| Specific | | | | | | | | | | | | | |
| Specific | H | D | T | V | T | D | S | R | A | I | G | N | F |
| | Residue # | | | | | | | | | | | | |
| | 148 | 150 | 156 | 159 | 244 | 245 | 246 | 247 | 269 | 308 | 309 | 321 | 323 |
| DENV3 WT | Q | Q | Q | T | K | K | Q | E | Q | K | E | K | E |
| Core | Q | Q | Q | I | T | Y | I | P | Q | K | E | K | E |
| Core & | N | K | K | I | T | Y | I | P | K | S | G | L | G |
| Specific | | | | | | | | | | | | | |
| Specific | N | K | K | I | K | K | Q | E | K | S | G | L | G |

TABLE 9
DENV4 EDE1 null

| | Residue # | | | | | | | | | | | | |
|---|---|---|---|---|---|---|---|---|---|---|---|---|---|
| | 2 | 28 | 44 | 45 | 69 | 71 | 72 | 73 | 77 | 82 | 102 | 103 | 106 |
| DENV4 WT | R | G | E | L | T | A | T | R | Q | L | G | N | G |
| Core | R | G | E | L | E | R | A | K | Q | L | D | S | G |
| Core & | H | D | T | V | E | R | A | K | A | I | D | S | F |
| Specific | | | | | | | | | | | | | |
| Specific | H | D | T | V | T | A | T | R | A | I | G | N | F |
| | Residue # | | | | | | | | | | | | |
| | 148 | 150 | 158 | 161 | 246 | 247 | 248 | 249 | 271 | 310 | 311 | 323 | 325 |
| DENV4 WT | T | A | H | T | K | R | Q | D | D | K | E | K | K |
| Core | T | A | H | I | T | Y | I | P | D | K | E | K | K |
| Core & | N | K | K | I | T | Y | I | P | K | S | G | L | G |
| Specific | | | | | | | | | | | | | |
| Specific | N | K | K | I | K | R | Q | D | K | S | G | L | G |

TABLE 10
Zika C10

| | Residue #* | | | | | | | | | | | | |
|---|---|---|---|---|---|---|---|---|---|---|---|---|---|
| | 46 | 47 | 52 | 55 | 67 | 68 | 69 | 70 | 71 | 72 | 73 | 74 | 81 |
| Zika | V | T | N | E | D | M | A | S | D | S | R | C | Y |
| DENV1 | L | K | N | V | N | T | T | T | D | S | R | C | T |
| DENV2 | I | K | Q | T | N | T | T | T | E | S | R | C | S |
| DENV3 | Q | K | Q | T | N | I | T | T | D | S | R | C | V |
| DENV4 | T | K | E | L | N | I | T | T | A | T | R | C | Y |

| | Residue #* | | | | | | | | | | | | |
|---|---|---|---|---|---|---|---|---|---|---|---|---|---|
| | 82 | 83 | 84 | 113 | 138 | 140 | 148 | 149 | 150 | 151 | 152 | 153 | 155 |
| Zika | L | D | K | L | R | M | H | S | G | M | I | V | D |
| DENV1 | L | V | E | L | S | I | Q | | | | | | Q |
| DENV2 | L | N | E | I | T | V | E | | | | | | A |
| DENV3 | L | P | E | L | T | I | Q | | | | | | Q |
| DENV4 | L | K | E | V | T | V | T | | | | | | A |

| | Residue #* | | | | | | | | | | | | |
|---|---|---|---|---|---|---|---|---|---|---|---|---|---|
| | 164 | 180 | 181 | 182 | 184 | 185 | 229 | 230 | 249 | 251 | 252 | 253 | 254 |
| Zika | R | L | G | G | G | S | A | D | H | K | R | Q | T |
| DENV1 | G | L | T | D | G | A | A | S | H | K | K | Q | E |
| DENV2 | G | L | T | G | G | T | A | D | H | K | K | Q | D |
| DENV3 | G | L | P | E | G | T | A | T | H | K | K | Q | E |
| DENV4 | G | L | P | D | G | E | A | D | H | K | R | Q | D |

| | Residue #* | | | | | | | | | | | | | | |
|---|---|---|---|---|---|---|---|---|---|---|---|---|---|---|---|
| | 276 | 277 | 278 | 279 | 283 | 299 | 315 | 316 | 329 | 331 | 369 | 370 | 371 | 372 | 373 |
| Zika | E | M | D | G | R | R | T | K | E | Q | T | E | N | S | K |
| DENV1 | Q | T | S | G | T | T | E | K | Q | K | E | | | K | P |
| DENV2 | Q | M | S | S | L | Q | V | K | R | Q | D | | | S | P |
| DENV3 | Q | N | S | G | S | E | K | K | K | E | E | | | E | P |
| DENV4 | D | S | G | D | H | R | D | K | K | K | N | | | S | V |

*Relative to ZIKV WT E

TABLE 11
Zika C8

| | Residue #* | | | | | | | | | |
|---|---|---|---|---|---|---|---|---|---|---|
| | 67 | 68 | 69 | 70 | 71 | 72 | 73 | 74 | 83 | 84 |
| Zika | D | M | A | S | D | S | R | C | D | K |
| DENV1 | N | T | T | T | D | S | R | C | V | E |
| DENV2 | N | T | T | T | E | S | R | C | N | E |
| DENV3 | N | I | T | T | D | S | R | C | P | E |
| DENV4 | N | I | T | T | A | T | R | C | K | E |
| | Residue #* | | | | | | | | | |
| | 113 | 148 | 163 | 252 | 254 | 278 | 279 | 315 | 317 | 329 |
| Zika | L | H | N | R | T | D | G | T | I | E |
| DENV1 | L | Q | H | K | E | S | G | E | E | Q |
| DENV2 | I | E | H | K | D | S | S | V | E | R |
| DENV3 | L | Q | Q | K | E | S | G | K | E | K |
| DENV4 | V | T | H | R | D | G | D | D | E | K |

*Relative to ZIKV WT E

TABLE 12
DENV1 C10

| | Residue #* | | | | | | | | | | | | |
|---|---|---|---|---|---|---|---|---|---|---|---|---|---|
| | 46 | 47 | 52 | 55 | 67 | 68 | 69 | 70 | 71 | 72 | 73 | 74 | 81 |
| Zika | V | T | N | E | D | M | A | S | D | S | R | C | Y |
| DENV1 | L | K | N | V | N | T | T | T | D | S | R | C | T |
| DENV2 | I | K | Q | T | N | T | T | T | E | S | R | C | S |
| DENV3 | Q | K | Q | T | N | I | T | T | D | S | R | C | V |
| DENV4 | T | K | E | L | N | I | T | T | A | T | R | C | Y |
| | Residue #* | | | | | | | | | | | | |
| | 82 | 83 | 84 | 113 | 138 | 140 | 148 | | | | | | 150 |
| Zika | L | D | K | L | R | M | H | S | G | M | I | V | D |
| DENV1 | L | V | E | L | S | I | Q | | | | | | Q |
| DENV2 | L | N | E | I | T | V | E | | | | | | A |
| DENV3 | L | P | E | L | T | I | Q | | | | | | Q |
| DENV4 | L | K | E | V | T | V | T | | | | | | A |
| | Residue #* | | | | | | | | | | | | |
| | 159 | 175 | 176 | 177 | 179 | 180 | 224 | 225 | 244 | 246 | 247 | 248 | 249 |
| Zika | R | L | G | G | G | S | A | D | H | K | R | Q | T |
| DENV1 | G | L | T | D | G | A | A | S | H | K | K | Q | E |
| DENV2 | G | L | T | G | G | T | A | D | H | K | K | Q | D |
| DENV3 | G | L | P | E | G | T | A | T | H | K | K | Q | E |
| DENV4 | G | L | P | D | G | E | A | D | H | K | R | Q | D |
| | Residue #* | | | | | | | | | | | | |
| | 271 | 272 | 273 | 274 | 278 | 293 | 309 | 310 | 323 | 325 | 362 | 363 | 364 |
| Zika | E | M | D | G | R | R | T | K | E | Q | T | S | K |
| DENV1 | Q | T | S | G | T | T | E | K | Q | K | E | K | P |
| DENV2 | Q | M | S | S | L | Q | V | K | R | Q | D | S | P |
| DENV3 | Q | N | S | G | S | E | K | K | K | E | E | E | P |
| DENV4 | D | S | G | D | H | R | D | K | K | K | N | S | V |

*Relative to DENV1 WT E

### *Relative to DENV1 WT E

TABLE 13
DENV1 C8

Residue #*

| | 67 | 68 | 69 | 70 | 71 | 72 | 73 | 74 | 83 | 84 |
|---|---|---|---|---|---|---|---|---|---|---|
| Zika | D | M | A | S | D | S | R | C | D | K |
| DENV1 | N | T | T | T | D | S | R | C | V | E |
| DENV2 | N | T | T | T | E | S | R | C | N | E |
| DENV3 | N | I | T | T | D | S | R | C | P | E |
| DENV4 | N | I | T | T | A | T | R | C | K | E |

| | Residue #* | | | | | | | | | |
|---|---|---|---|---|---|---|---|---|---|---|
| | 113 | 148 | 158 | 247 | 249 | 273 | 274 | 309 | 311 | 323 |
| Zika | L | H | N | R | T | D | G | T | I | E |
| DENV1 | L | Q | H | K | E | S | G | E | E | Q |
| DENV2 | I | E | H | K | D | S | S | V | E | R |
| DENV3 | L | Q | Q | K | E | S | G | K | E | K |
| DENV4 | V | T | H | R | D | G | D | D | E | K |

*Relative to DENV1 WT E

TABLE 14
DENV2 C10

| | Residue #* | | | | | | | | | | | | |
|---|---|---|---|---|---|---|---|---|---|---|---|---|---|
| | 46 | 47 | 52 | 55 | 67 | 68 | 69 | 70 | 71 | 72 | 73 | 74 | 81 |
| Zika | V | T | N | E | D | M | A | S | D | S | R | C | Y |
| DENV1 | L | K | N | V | N | T | T | T | D | S | R | C | T |
| DENV2 | I | K | Q | T | N | T | T | T | E | S | R | C | S |
| DENV3 | Q | K | Q | T | N | I | T | T | D | S | R | C | V |
| DENV4 | T | K | E | L | N | I | T | T | A | T | R | C | Y |
| | Residue #* | | | | | | | | | | | | |
| | 82 | 83 | 84 | 113 | 138 | 140 | 148 | | | | | | 150 |
| Zika | L | D | K | L | R | M | H | S | G | M | I | V | D |
| DENV1 | L | V | E | L | S | I | Q | | | | | | Q |
| DENV2 | L | N | E | I | T | V | E | | | | | | A |
| DENV3 | L | P | E | L | T | I | Q | | | | | | Q |
| DENV4 | L | K | E | V | T | V | T | | | | | | A |
| | Residue #* | | | | | | | | | | | | |
| | 159 | 175 | 176 | 177 | 179 | 180 | 224 | 225 | 244 | 246 | 247 | 248 | 249 |
| Zika | R | L | G | G | G | S | A | D | H | K | R | Q | T |
| DENV1 | G | L | T | D | G | A | A | S | H | K | K | Q | E |
| DENV2 | G | L | T | G | G | T | A | D | H | K | K | Q | D |
| DENV3 | G | L | P | E | G | T | A | T | H | K | K | Q | E |
| DENV4 | G | L | P | D | G | E | A | D | H | K | R | Q | D |
| | Residue #* | | | | | | | | | | | | |
| | 271 | 272 | 273 | 274 | 278 | 293 | 309 | 310 | 323 | 325 | 362 | 363 | 364 |
| Zika | E | M | D | G | R | R | T | K | E | Q | T | S | K |
| DENV1 | Q | T | S | G | T | T | E | K | Q | K | E | K | P |
| DENV2 | Q | M | S | S | L | Q | V | K | R | Q | D | S | P |
| DENV3 | Q | N | S | G | S | E | K | K | K | E | E | E | P |
| DENV4 | D | S | G | D | H | R | D | K | K | K | N | S | V |

*Relative to DENV2 WT E

TABLE 15
DENV2 C8

Residue #*

| | 67 | 68 | 69 | 70 | 71 | 72 | 73 | 74 | 83 | 84 |
|---|---|---|---|---|---|---|---|---|---|---|
| Zika | D | M | A | S | D | S | R | C | D | K |
| DENV1 | N | T | T | T | D | S | R | C | V | E |
| DENV2 | N | T | T | T | E | S | R | C | N | E |
| DENV3 | N | I | T | T | D | S | R | C | P | E |
| DENV4 | N | I | T | T | A | T | R | C | K | E |

| | Residue #* | | | | | | | | | |
|---|---|---|---|---|---|---|---|---|---|---|
| | 113 | 148 | 158 | 247 | 249 | 273 | 274 | 309 | 311 | 323 |
| Zika | L | H | N | R | T | D | G | T | I | E |
| DENV1 | L | Q | H | K | E | S | G | E | E | Q |
| DENV2 | I | E | H | K | D | S | S | V | E | R |
| DENV3 | L | Q | Q | K | E | S | G | K | E | K |
| DENV4 | V | T | H | R | D | G | D | D | E | K |

*Relative to DENV2 WT E

TABLE 16
DENV3 C10

| | Residue #* | | | | | | | | | | | | |
|---|---|---|---|---|---|---|---|---|---|---|---|---|---|
| | 46 | 47 | 52 | 55 | 67 | 68 | 69 | 70 | 71 | 72 | 73 | 74 | 81 |
| Zika | V | T | N | E | D | M | A | S | D | S | R | C | Y |
| DENV1 | L | K | N | V | N | T | T | T | D | S | R | C | T |
| DENV2 | I | K | Q | T | N | T | T | T | E | S | R | C | S |
| DENV3 | Q | K | Q | T | N | I | T | T | D | S | R | C | V |
| DENV4 | T | K | E | L | N | I | T | T | A | T | R | C | Y |
| | Residue #* | | | | | | | | | | | | |
| | 82 | 83 | 84 | 113 | 138 | 140 | 148 | | | | | | 150 |
| Zika | L | D | K | L | R | M | H | S | G | M | I | V | D |
| DENV1 | L | V | E | L | S | I | Q | | | | | | Q |
| DENV2 | L | N | E | I | T | V | E | | | | | | A |
| DENV3 | L | P | E | L | T | I | Q | | | | | | Q |
| DENV4 | L | K | E | V | T | V | T | | | | | | A |
| | Residue #* | | | | | | | | | | | | |
| | 159 | 173 | 174 | 175 | 177 | 178 | 222 | 223 | 242 | 244 | 245 | 246 | 247 |
| Zika | R | L | G | G | G | S | A | D | H | K | R | Q | T |
| DENV1 | G | L | T | D | G | A | A | S | H | K | K | Q | E |
| DENV2 | G | L | T | G | G | T | A | D | H | K | K | Q | D |
| DENV3 | G | L | P | E | G | T | A | T | H | K | K | Q | E |
| DENV4 | G | L | P | D | G | E | A | D | H | K | R | Q | D |
| | Residue #* | | | | | | | | | | | | |
| | 269 | 270 | 271 | 272 | 276 | 291 | 307 | 308 | 321 | 323 | 360 | 361 | 362 |
| Zika | E | M | D | G | R | R | T | K | E | Q | T | S | K |
| DENV1 | Q | T | S | G | T | T | E | K | Q | K | E | K | P |
| DENV2 | Q | M | S | S | L | Q | V | K | R | Q | D | S | P |
| DENV3 | Q | N | S | G | S | E | K | K | K | E | E | E | P |
| DENV4 | D | S | G | D | H | R | D | K | K | K | N | S | V |

*Relative to DENV3 WT E

TABLE 17
DENV3 C8

Residue #*

| | 67 | 68 | 69 | 70 | 71 | 72 | 73 | 74 | 83 | 84 |
|---|---|---|---|---|---|---|---|---|---|---|
| Zika | D | M | A | S | D | S | R | C | D | K |
| DENV1 | N | T | T | T | D | S | R | C | V | E |
| DENV2 | N | T | T | T | E | S | R | C | N | E |
| DENV3 | N | I | T | T | D | S | R | C | P | E |
| DENV4 | N | I | T | T | A | T | R | C | K | E |

| | Residue #* | | | | | | | | | |
|---|---|---|---|---|---|---|---|---|---|---|
| | 113 | 148 | 158 | 245 | 247 | 271 | 272 | 307 | 309 | 321 |
| Zika | L | H | N | R | T | D | G | T | I | E |
| DENV1 | L | Q | H | K | E | S | G | E | E | Q |
| DENV2 | I | E | H | K | D | S | S | V | E | R |
| DENV3 | L | Q | Q | K | E | S | G | K | E | K |
| DENV4 | V | T | H | R | D | G | D | D | E | K |

*Relative to DENV3 WT E

TABLE 18
DENV4 C10

| | Residue #* | | | | | | | | | | | | |
|---|---|---|---|---|---|---|---|---|---|---|---|---|---|
| | 46 | 47 | 52 | 55 | 67 | 68 | 69 | 70 | 71 | 72 | 73 | 74 | 81 |
| Zika | V | T | N | E | D | M | A | S | D | S | R | C | Y |
| DENV1 | L | K | N | V | N | T | T | T | D | S | R | C | T |
| DENV2 | I | K | Q | T | N | T | T | T | E | S | R | C | S |
| DENV3 | Q | K | Q | T | N | I | T | T | D | S | R | C | V |
| DENV4 | T | K | E | L | N | I | T | T | A | T | R | C | Y |
| | Residue #* | | | | | | | | | | | | |
| | 82 | 83 | 84 | 113 | 138 | 140 | 148 | | | | | | 150 |
| Zika | L | D | K | L | R | M | H | S | G | M | I | V | D |
| DENV1 | L | V | E | L | S | I | Q | | | | | | Q |
| DENV2 | L | N | E | I | T | V | E | | | | | | A |
| DENV3 | L | P | E | L | T | I | Q | | | | | | Q |
| DENV4 | L | K | E | V | T | V | T | | | | | | A |
| | Residue #* | | | | | | | | | | | | |
| | 159 | 175 | 176 | 177 | 179 | 180 | 224 | 225 | 244 | 246 | 247 | 248 | 249 |
| Zika | R | L | G | G | G | S | A | D | H | K | R | Q | T |
| DENV1 | G | L | T | D | G | A | A | S | H | K | K | Q | E |
| DENV2 | G | L | T | G | G | T | A | D | H | K | K | Q | D |
| DENV3 | G | L | P | E | G | T | A | T | H | K | K | Q | E |
| DENV4 | G | L | P | D | G | E | A | D | H | K | R | Q | D |
| | Residue #* | | | | | | | | | | | | |
| | 271 | 272 | 273 | 274 | 278 | 293 | 309 | 310 | 323 | 325 | 362 | 363 | 364 |
| Zika | E | M | D | G | R | R | T | K | E | Q | T | S | K |
| DENV1 | Q | T | S | G | T | T | E | K | Q | K | E | K | P |
| DENV2 | Q | M | S | S | L | Q | V | K | R | Q | D | S | P |
| DENV3 | Q | N | S | G | S | E | K | K | K | E | E | E | P |
| DENV4 | D | S | G | D | H | R | D | K | K | K | N | S | V |

*Relative to DENV4 WT E

TABLE 19
DENV4 C8

| | Residue #* | | | | | | | | | |
|---|---|---|---|---|---|---|---|---|---|---|
| | 67 | 68 | 69 | 70 | 71 | 72 | 73 | 74 | 83 | 84 |
| Zika | D | M | A | S | D | S | R | C | D | K |
| DENV1 | N | T | T | T | D | S | R | C | V | E |
| DENV2 | N | T | T | T | E | S | R | C | N | E |
| DENV3 | N | I | T | T | D | S | R | C | P | E |
| DENV4 | N | I | T | T | A | T | R | C | K | E |
| | Residue #* | | | | | | | | | |
| | 113 | 148 | 158 | 247 | 249 | 273 | 274 | 309 | 311 | 323 |
| Zika | L | H | N | R | T | D | G | T | I | E |
| DENV1 | L | Q | H | K | E | S | G | E | E | Q |
| DENV2 | I | E | H | K | D | S | S | V | E | R |
| DENV3 | L | Q | Q | K | E | S | G | K | E | K |
| DENV4 | V | T | H | R | D | G | D | D | E | K |

*Relative to DENV4 WT E

TABLE 20
ZIKV-DENV 5J7 Swap

| | Residue #* | | | | | | | | | | | | |
|---|---|---|---|---|---|---|---|---|---|---|---|---|---|
| | 49 | 50 | 51 | 52 | 53 | 54 | 55 | 56 | 57 | 58 | 59 | 60 | 61 |
| DENV1 | E | V | T | N | P | A | V | L | R | K | L | C | I |
| DENV2 | E | A | K | Q | P | A | T | L | R | K | Y | C | I |
| DENV3 | E | A | T | Q | L | A | T | L | R | K | L | C | I |
| DENV4 | T | A | K | E | V | A | L | L | R | T | Y | C | I |
| Zika WT | T | V | S | N | M | A | E | V | R | S | Y | C | Y |
| | Residue #* | | | | | | | | | | | | |
| | 62 | 63 | 122 | 123 | 124 | 125 | 126 | 129 | 130 | 132 | 200 | 201 | 202 |
| DENV1 | E | A | V | T | K | L | E | I | V | Y | E | M | V |
| DENV2 | E | A | K | K | N | M | E | V | V | P | E | M | V |
| DENV3 | E | G | L | E | P | I | E | V | V | Y | E | M | I |
| DENV4 | E | A | S | G | K | I | T | L | V | I | E | M | I |
| Zika WT | E | A | S | K | K | M | T | S | I | P | D | L | Y |
| | Residue #* | | | | | | | | | | | | |
| | 203 | 207 | 210 | 212 | 215 | 216 | 219 | 221 | 226 | 227 | 230 | 232 | 235 |
| DENV1 | L | E | S | L | K | Q | L | L | T | S | S | S | T |
| DENV2 | L | E | A | L | R | Q | L | L | L | P | D | Q | N |
| DENV3 | L | K | A | M | R | Q | F | L | T | S | T | E | T |
| DENV4 | L | K | T | L | K | Q | L | L | T | A | D | S | H |
| Zika WT | Y | N | H | L | K | E | H | I | H | A | D | G | H |

| | Residue #* | | | | | | | | | |
|---|---|---|---|---|---|---|---|---|---|---|
| | 275 | 276 | 278 | 279 | 280 | 281 | 283 | 284 | 285 | 286 |
| DENV1 | I | Q | S | G | T | T | T | I | F | A |
| DENV2 | I | Q | S | S | G | N | L | L | F | T |
| DENV3 | I | Q | S | G | G | T | S | I | F | A |
| DENV4 | V | D | G | D | G | N | H | M | F | A |
| Zika WT | A | E | D | G | A | K | R | L | S | S |

*Relative to ZIKV E WT

TABLE 21
ZIKV-DENV1 5J7 Swap

| | Residue #* | | | | | | | | | | | | |
|---|---|---|---|---|---|---|---|---|---|---|---|---|---|
| | 49 | 50 | 51 | 52 | 53 | 54 | 55 | 56 | 57 | 58 | 59 | 60 | 61 |
| DENV1 5J7 | E | V | T | N | P | A | V | L | R | K | L | C | I |
| DENV2 5J7 | E | A | K | Q | P | A | T | L | R | K | Y | C | I |
| DENV3 5J7 | E | A | T | Q | L | A | T | L | R | K | L | C | I |
| DENV4 5J7 | T | A | K | E | V | A | L | L | R | T | Y | C | I |
| Zika WT | T | V | S | N | M | A | E | V | R | S | Y | C | Y |
| | Residue #* | | | | | | | | | | | | |
| | 62 | 63 | 122 | 123 | 124 | 125 | 126 | 129 | 130 | 132 | 195 | 196 | 197 |
| DENV1 5J7 | E | A | V | T | K | L | E | I | V | Y | E | M | V |
| DENV2 5J7 | E | A | K | K | N | M | E | V | V | P | E | M | V |
| DENV3 5J7 | E | G | L | E | P | I | E | V | V | Y | E | M | I |
| DENV4 5J7 | E | A | S | G | K | I | T | L | V | I | E | M | I |
| Zika WT | E | A | S | K | K | M | T | S | I | P | D | L | Y |
| | Residue #* | | | | | | | | | | | | |
| | 198 | 202 | 205 | 207 | 210 | 211 | 214 | 216 | 221 | 222 | 225 | 227 | 230 |
| DENV1 5J7 | L | E | S | L | K | Q | L | L | T | S | S | S | T |
| DENV2 5J7 | L | E | A | L | R | Q | L | L | L | P | D | Q | N |
| DENV3 5J7 | L | K | A | M | R | Q | F | L | T | S | T | E | T |
| DENV4 5J7 | L | K | T | L | K | Q | L | L | T | A | D | S | H |
| Zika WT | Y | N | H | L | K | E | H | I | H | A | D | G | H |

| | Residue #* | | | | | | | | | |
|---|---|---|---|---|---|---|---|---|---|---|
| | 270 | 271 | 273 | 274 | 275 | 276 | 278 | 279 | 280 | 281 |
| DENV1 5J7 | I | Q | S | G | T | T | T | I | F | A |
| DENV2 5J7 | I | Q | S | S | G | N | L | L | F | T |
| DENV3 5J7 | I | Q | S | G | G | T | S | I | F | A |
| DENV4 5J7 | V | D | G | D | G | N | H | M | F | A |
| Zika WT | A | E | D | G | A | K | R | L | S | S |

*Relative to DENV1 E WT

TABLE 22
ZIKV-DENV2 5J7 Swap

| | Residue #* | | | | | | | | | | | | |
|---|---|---|---|---|---|---|---|---|---|---|---|---|---|
| | 49 | 50 | 51 | 52 | 53 | 54 | 55 | 56 | 57 | 58 | 59 | 60 | 61 |
| DENV1 5J7 | E | V | T | N | P | A | V | L | R | K | L | C | I |
| DENV2 5J7 | E | A | K | Q | P | A | T | L | R | K | Y | C | I |
| DENV3 5J7 | E | A | T | Q | L | A | T | L | R | K | L | C | I |
| DENV4 5J7 | T | A | K | E | V | A | L | L | R | T | Y | C | I |
| Zika WT | T | V | S | N | M | A | E | V | R | S | Y | C | Y |
| | Residue #* | | | | | | | | | | | | |
| | 62 | 63 | 122 | 123 | 124 | 125 | 126 | 129 | 130 | 132 | 195 | 196 | 197 |
| DENV1 5J7 | E | A | V | T | K | L | E | I | V | Y | E | M | V |
| DENV2 5J7 | E | A | K | K | N | M | E | V | V | P | E | M | V |
| DENV3 5J7 | E | G | L | E | P | I | E | V | V | Y | E | M | I |
| DENV4 5J7 | E | A | S | G | K | I | T | L | V | I | E | M | I |
| Zika WT | E | A | S | K | K | M | T | S | I | P | D | L | Y |
| | Residue #* | | | | | | | | | | | | |
| | 198 | 202 | 205 | 207 | 210 | 211 | 214 | 216 | 221 | 222 | 225 | 227 | 230 |
| DENV1 5J7 | L | E | S | L | K | Q | L | L | T | S | S | S | T |
| DENV2 5J7 | L | E | A | L | R | Q | L | L | L | P | D | Q | N |
| DENV3 5J7 | L | K | A | M | R | Q | F | L | T | S | T | E | T |
| DENV4 5J7 | L | K | T | L | K | Q | L | L | T | A | D | S | H |
| Zika WT | Y | N | H | L | K | E | H | I | H | A | D | G | H |

| | Residue #* | | | | | | | | | |
|---|---|---|---|---|---|---|---|---|---|---|
| | 270 | 271 | 273 | 274 | 275 | 276 | 278 | 279 | 280 | 281 |
| DENV1 5J7 | I | Q | S | G | T | T | T | I | F | A |
| DENV2 5J7 | I | Q | S | S | G | N | L | L | F | T |
| DENV3 5J7 | I | Q | S | G | G | T | S | I | F | A |
| DENV4 5J7 | V | D | G | D | G | N | H | M | F | A |
| Zika WT | A | E | D | G | A | K | R | L | S | S |

*Relative to DENV2 E WT

TABLE 23
ZIKV-DENV3 5J7 Swap

| | Residue #* | | | | | | | | | | | | |
|---|---|---|---|---|---|---|---|---|---|---|---|---|---|
| | 49 | 50 | 51 | 52 | 53 | 54 | 55 | 56 | 57 | 58 | 59 | 60 | 61 |
| DENV1 5J7 | E | V | T | N | P | A | V | L | R | K | L | C | I |
| DENV2 5J7 | E | A | K | Q | P | A | T | L | R | K | Y | C | I |
| DENV3 5J7 | E | A | T | Q | L | A | T | L | R | K | L | C | I |
| DENV4 5J7 | T | A | K | E | V | A | L | L | R | T | Y | C | I |
| Zika WT | T | V | S | N | M | A | E | V | R | S | Y | C | Y |
| | Residue #* | | | | | | | | | | | | |
| | 62 | 63 | 122 | 123 | 124 | 125 | 126 | 129 | 130 | 132 | 193 | 194 | 195 |
| DENV1 5J7 | E | A | V | T | K | L | E | I | V | Y | E | M | V |
| DENV2 5J7 | E | A | K | K | N | M | E | V | V | P | E | M | V |
| DENV3 5J7 | E | G | L | E | P | I | E | V | V | Y | E | M | I |
| DENV4 5J7 | E | A | S | G | K | I | T | L | V | I | E | M | I |
| Zika WT | E | A | S | K | K | M | T | S | I | P | D | L | Y |
| | Residue #* | | | | | | | | | | | | |
| | 196 | 200 | 203 | 205 | 208 | 209 | 212 | 214 | 219 | 220 | 223 | 225 | 228 |
| DENV1 5J7 | L | E | S | L | K | Q | L | L | T | S | S | S | T |
| DENV2 5J7 | L | E | A | L | R | Q | L | L | L | P | D | Q | N |
| DENV3 5J7 | L | K | A | M | R | Q | F | L | T | S | T | E | T |
| DENV4 5J7 | L | K | T | L | K | Q | L | L | T | A | D | S | H |
| Zika WT | Y | N | H | L | K | E | H | I | H | A | D | G | H |

| | Residue #* | | | | | | | | | |
|---|---|---|---|---|---|---|---|---|---|---|
| | 268 | 269 | 271 | 272 | 273 | 274 | 276 | 277 | 278 | 279 |
| DENV1 5J7 | I | Q | S | G | T | T | T | I | F | A |
| DENV2 5J7 | I | Q | S | S | G | N | L | L | F | T |
| DENV3 5J7 | I | Q | S | G | G | T | S | I | F | A |
| DENV4 5J7 | V | D | G | D | G | N | H | M | F | A |
| Zika WT | A | E | D | G | A | K | R | L | S | S |

*Relative to DENV3 E WT

TABLE 24
ZIKV-DENV4 5J7 Swap

| | Residue #* | | | | | | | | | | | | |
|---|---|---|---|---|---|---|---|---|---|---|---|---|---|
| | 49 | 50 | 51 | 52 | 53 | 54 | 55 | 56 | 57 | 58 | 59 | 60 | 61 |
| DENV1 5J7 | E | V | T | N | P | A | V | L | R | K | L | C | I |
| DENV2 5J7 | E | A | K | Q | P | A | T | L | R | K | Y | C | I |
| DENV3 5J7 | E | A | T | Q | L | A | T | L | R | K | L | C | I |
| DENV4 5J7 | T | A | K | E | V | A | L | L | R | T | Y | C | I |
| Zika WT | T | V | S | N | M | A | E | V | R | S | Y | C | Y |
| | Residue #* | | | | | | | | | | | | |
| | 62 | 63 | 122 | 123 | 124 | 125 | 126 | 129 | 130 | 132 | 195 | 196 | 197 |
| DENV1 5J7 | E | A | V | T | K | L | E | I | V | Y | E | M | V |
| DENV2 5J7 | E | A | K | K | N | M | E | V | V | P | E | M | V |
| DENV3 5J7 | E | G | L | E | P | I | E | V | V | Y | E | M | I |
| DENV4 5J7 | E | A | S | G | K | I | T | L | V | I | E | M | I |
| Zika WT | E | A | S | K | K | M | T | S | I | P | D | L | Y |
| | Residue #* | | | | | | | | | | | | |
| | 198 | 202 | 205 | 207 | 210 | 211 | 214 | 216 | 221 | 222 | 225 | 227 | 230 |
| DENV1 5J7 | L | E | S | L | K | Q | L | L | T | S | S | S | T |
| DENV2 5J7 | L | E | A | L | R | Q | L | L | L | P | D | Q | N |
| DENV3 5J7 | L | K | A | M | R | Q | F | L | T | S | T | E | T |
| DENV4 5J7 | L | K | T | L | K | Q | L | L | T | A | D | S | H |
| Zika WT | Y | N | H | L | K | E | H | I | H | A | D | G | H |

| | Residue #* | | | | | | | | | |
|---|---|---|---|---|---|---|---|---|---|---|
| | 270 | 271 | 273 | 274 | 275 | 276 | 278 | 279 | 280 | 281 |
| DENV1 5J7 | I | Q | S | G | T | T | T | I | F | A |
| DENV2 5J7 | I | Q | S | S | G | N | L | L | F | T |
| DENV3 5J7 | I | Q | S | G | G | T | S | I | F | A |
| DENV4 5J7 | V | D | G | D | G | N | H | M | F | A |
| Zika WT | A | E | D | G | A | K | R | L | S | S |

*Relative to DENV4 E WT

TABLE 25
DENV-ZIKV Z20 Swap

| | Residue #* | | | | | | | | | | |
|---|---|---|---|---|---|---|---|---|---|---|---|
| | 67 | 68 | 69 | 84 | 120 | 208 | 232 | 233 | 276 | 277 | 278 |
| Zika | D | M | A | K | A | N | G | T | E | M | D |
| DENV1 | N | T | T | E | K | K | S | Q | Q | T | |
| DENV2 | N | T | T | E | T | N | Q | G | Q | M | |
| DENV3 | N | I | T | E | Q | N | E | T | Q | N | |
| DENV4 | N | I | T | E | S | K | S | E | D | S | |

*Relative to ZikV WT

| | Residue #* | | | | | | | | | | |
|---|---|---|---|---|---|---|---|---|---|---|---|
| | 67 | 68 | 69 | 84 | 120 | 203 | 227 | 228 | 271 | 272 | 273 |
| Zika | D | M | A | K | A | N | G | T | E | M | D |
| DENV1 | N | T | T | E | K | K | S | Q | Q | T | |
| DENV2 | N | T | T | E | T | N | Q | G | Q | M | |
| DENV3 | N | I | T | E | Q | N | E | T | Q | N | |
| DENV4 | N | I | T | E | S | K | S | E | D | S | |

*Relative to DENV1 WT

| | Residue #* | | | | | | | | | | |
|---|---|---|---|---|---|---|---|---|---|---|---|
| | 67 | 68 | 69 | 84 | 120 | 203 | 227 | 228 | 271 | 272 | 273 |
| Zika | D | M | A | K | A | N | G | T | E | M | D |
| DENV1 | N | T | T | E | K | K | S | Q | Q | T | |
| DENV2 | N | T | T | E | T | N | Q | G | Q | M | |
| DENV3 | N | I | T | E | Q | N | E | T | Q | N | |
| DENV4 | N | I | T | E | S | K | S | E | D | S | |

*Relative to DENV2 WT

| | Residue #* | | | | | | | | | | |
|---|---|---|---|---|---|---|---|---|---|---|---|
| | 67 | 68 | 69 | 84 | 120 | 201 | 225 | 226 | 269 | 270 | 271 |
| Zika | D | M | A | K | A | N | G | T | E | M | D |
| DENV1 | N | T | T | E | K | K | S | Q | Q | T | |
| DENV2 | N | T | T | E | T | N | Q | G | Q | M | |
| DENV3 | N | I | T | E | Q | N | E | T | Q | N | |
| DENV4 | N | I | T | E | S | K | S | E | D | S | |

*Relative to DENV3 WT

| | Residue #* | | | | | | | | | | |
|---|---|---|---|---|---|---|---|---|---|---|---|
| | 67 | 68 | 69 | 84 | 120 | 203 | 227 | 228 | 271 | 272 | 273 |
| Zika | D | M | A | K | A | N | G | T | E | M | D |
| DENV1 | N | T | T | E | K | K | S | Q | Q | T | |
| DENV2 | N | T | T | E | T | N | Q | G | Q | M | |
| DENV3 | N | I | T | E | Q | N | E | T | Q | N | |
| DENV4 | N | I | T | E | S | K | S | E | D | S | |

*Relative to DENV4 WT

TABLE 26
DENV-ZIKV Z3L1 Swap

| | Residue #* | | | | | | | | |
|---|---|---|---|---|---|---|---|---|---|
| | 46 | 47 | 52 | 138 | 140 | 156 | 158 | 159 | 166 |
| Zika | V | T | N | R | M | T | H | E | K |
| DENV1 | L | K | N | S | I | V | N | E | T |
| DENV2 | I | K | Q | T | V | V | N | D | E |
| DENV3 | Q | K | Q | T | I | V | N | E | T |
| DENV4 | T | K | E | T | V | V | N | D | T |

| | Residue #* | | | | | | | |
|---|---|---|---|---|---|---|---|---|
| | 168 | 208 | 276 | 277 | 278 | 280 | 281 | 283 |
| Zika | E | N | E | M | D | A | K | R |
| DENV1 | T | K | Q | T | | G | T | T |
| DENV2 | K | N | Q | M | | S | G | L |
| DENV3 | E | N | Q | N | | G | G | S |
| DENV4 | T | K | D | S | | D | G | H |

*Relative to ZikV WT

TABLE 27
DENV1-ZIKV Z3L1 Swap

| | Residue #* | | | | | | | | |
|---|---|---|---|---|---|---|---|---|---|
| | 46 | 47 | 52 | 138 | 140 | 151 | 153 | 154 | 161 |
| Zika | V | T | N | R | M | T | H | E | K |
| DENV1 | L | K | N | S | I | V | N | E | T |
| DENV2 | I | K | Q | T | V | V | N | D | E |
| DENV3 | Q | K | Q | T | I | V | N | E | T |
| DENV4 | T | K | E | T | V | V | N | D | T |

| | Residue #* | | | | | | | |
|---|---|---|---|---|---|---|---|---|
| | 163 | 203 | 271 | 272 | 273 | 275 | 276 | 278 |
| Zika | E | N | E | M | D | A | K | R |
| DENV1 | T | K | Q | T | | G | T | T |
| DENV2 | K | N | Q | M | | S | G | L |
| DENV3 | E | N | Q | N | | G | G | S |
| DENV4 | T | K | D | S | | D | G | H |

*Relative to DENV1 WT

TABLE 28
DENV2-ZIKV Z3L1 Swap

| | Residue #* | | | | | | | | |
|---|---|---|---|---|---|---|---|---|---|
| | 46 | 47 | 52 | 138 | 140 | 151 | 153 | 154 | 161 |
| Zika | V | T | N | R | M | T | H | E | K |
| DENV1 | L | K | N | S | I | V | N | E | T |
| DENV2 | I | K | Q | T | V | V | N | D | E |
| DENV3 | Q | K | Q | T | I | V | N | E | T |
| DENV4 | T | K | E | T | V | V | N | D | T |

| | Residue #* | | | | | | | |
|---|---|---|---|---|---|---|---|---|
| | 163 | 203 | 271 | 272 | 273 | 275 | 276 | 278 |
| Zika | E | N | E | M | D | A | K | R |
| DENV1 | T | K | Q | T | | G | T | T |
| DENV2 | K | N | Q | M | | S | G | L |
| DENV3 | E | N | Q | N | | G | G | S |
| DENV4 | T | K | D | S | | D | G | H |

*Relative to DENV2 WT

TABLE 29
DENV3-ZIKV Z3L1 Swap

| | Residue #* | | | | | | | | |
|---|---|---|---|---|---|---|---|---|---|
| | 46 | 47 | 52 | 138 | 140 | 151 | 153 | 154 | 159 |
| Zika | V | T | N | R | M | T | H | E | K |
| DENV1 | L | K | N | S | I | V | N | E | T |
| DENV2 | I | K | Q | T | V | V | N | D | E |
| DENV3 | Q | K | Q | T | I | V | N | E | T |
| DENV4 | T | K | E | T | V | V | N | D | T |

| | Residue #* | | | | | | | |
|---|---|---|---|---|---|---|---|---|
| | 161 | 201 | 269 | 270 | 271 | 273 | 274 | 276 |
| Zika | E | N | E | M | D | A | K | R |
| DENV1 | T | K | Q | T | | G | T | T |
| DENV2 | K | N | Q | M | | S | G | L |
| DENV3 | E | N | Q | N | | G | G | S |
| DENV4 | T | K | D | S | | D | G | H |

*Relative to DENV3 WT

TABLE 30
DENV4-ZIKV Z3L1 Swap

| | Residue #* | | | | | | | | |
|---|---|---|---|---|---|---|---|---|---|
| | 46 | 47 | 52 | 138 | 140 | 151 | 153 | 154 | 161 |
| Zika | V | T | N | R | M | T | H | E | K |
| DENV1 | L | K | N | S | I | V | N | E | T |
| DENV2 | I | K | Q | T | V | V | N | D | E |
| DENV3 | Q | K | Q | T | I | V | N | E | T |
| DENV4 | T | K | E | T | V | V | N | D | T |

| | Residue #* | | | | | | | |
|---|---|---|---|---|---|---|---|---|
| | 163 | 203 | 271 | 272 | 273 | 275 | 276 | 278 |
| Zika | E | N | E | M | D | A | K | R |
| DENV1 | T | K | Q | T | | G | T | T |
| DENV2 | K | N | Q | M | | S | G | L |
| DENV3 | E | N | Q | N | | G | G | S |
| DENV4 | T | K | D | S | | D | G | H |

*Relative to DENV4 WT

TABLE 31
DENV-ZIKV Z20 and Z3L1 Swaps

| | Residue #* | | | | | | | | | | | |
|---|---|---|---|---|---|---|---|---|---|---|---|---|
| | 46 | 47 | 52 | 67 | 68 | 69 | 84 | 120 | 138 | 140 | 156 | 158 |
| Zika | V | T | N | D | M | A | K | A | R | M | T | H |
| DENV1 | L | K | N | N | T | T | E | K | S | I | V | N |
| DENV2 | I | K | Q | N | T | T | E | T | T | V | V | N |
| DENV3 | Q | K | Q | N | I | T | E | Q | T | I | V | N |
| DENV4 | T | K | E | N | I | T | E | S | T | V | V | N |

| | Residue #* | | | | | | | | | | | |
|---|---|---|---|---|---|---|---|---|---|---|---|---|
| | 159 | 166 | 168 | 208 | 232 | 233 | 276 | 277 | 278 | 280 | 281 | 283 |
| Zika | E | K | E | N | G | T | E | M | D | A | K | R |
| DENV1 | E | T | T | K | S | Q | Q | T | | G | T | T |
| DENV2 | D | E | K | N | Q | G | Q | M | | S | G | L |
| DENV3 | E | T | E | N | E | T | Q | N | | G | G | S |
| DENV4 | D | T | T | K | S | E | D | S | | D | G | H |

*Relative to ZikV WT

TABLE 32
DENV1-ZIKV Z20 and Z3L1 Swaps

| | Residue #* | | | | | | | | | | | |
|---|---|---|---|---|---|---|---|---|---|---|---|---|
| | 46 | 47 | 52 | 67 | 68 | 69 | 84 | 120 | 138 | 140 | 151 | 153 |
| Zika | V | T | N | D | M | A | K | A | R | M | T | H |
| DENV1 | L | K | N | N | T | T | E | K | S | I | V | N |
| DENV2 | I | K | Q | N | T | T | E | T | T | V | V | N |
| DENV3 | Q | K | Q | N | I | T | E | Q | T | I | V | N |
| DENV4 | T | K | E | N | I | T | E | S | T | V | V | N |
| | Residue #* | | | | | | | | | | | |
| | 154 | 161 | 163 | 203 | 227 | 228 | 271 | 272 | 273 | 275 | 276 | 278 |
| Zika | E | K | E | N | G | T | E | M | D | A | K | R |
| DENV1 | E | T | T | K | S | Q | Q | T | | G | T | T |
| DENV2 | D | E | K | N | Q | G | Q | M | | S | G | L |
| DENV3 | E | T | E | N | E | T | Q | N | | G | G | S |
| DENV4 | D | T | T | K | S | E | D | S | | D | G | H |

*Relative to DENV1 WT

TABLE 33
DENV2-ZIKV Z20 and Z3L1 Swaps

| | Residue #* | | | | | | | | | | | |
|---|---|---|---|---|---|---|---|---|---|---|---|---|
| | 46 | 47 | 52 | 67 | 68 | 69 | 84 | 120 | 138 | 140 | 151 | 153 |
| Zika | V | T | N | D | M | A | K | A | R | M | T | H |
| DENV1 | L | K | N | N | T | T | E | K | S | I | V | N |
| DENV2 | I | K | Q | N | T | T | E | T | T | V | V | N |
| DENV3 | Q | K | Q | N | I | T | E | Q | T | I | V | N |
| DENV4 | T | K | E | N | I | T | E | S | T | V | V | N |
| | Residue #* | | | | | | | | | | | |
| | 154 | 161 | 163 | 203 | 227 | 228 | 271 | 272 | 273 | 275 | 276 | 278 |
| Zika | E | K | E | N | G | T | E | M | D | A | K | R |
| DENV1 | E | T | T | K | S | Q | Q | T | | G | T | T |
| DENV2 | D | E | K | N | Q | G | Q | M | | S | G | L |
| DENV3 | E | T | E | N | E | T | Q | N | | G | G | S |
| DENV4 | D | T | T | K | S | E | D | S | | D | G | H |

*Relative to DENV2 WT

TABLE 34
DENV3-ZIKV Z20 and Z3L1 Swaps

| | Residue #* | | | | | | | | | | | |
|---|---|---|---|---|---|---|---|---|---|---|---|---|
| | 46 | 47 | 52 | 67 | 68 | 69 | 84 | 120 | 138 | 140 | 151 | 153 |
| Zika | V | T | N | D | M | A | K | A | R | M | T | H |
| DENV1 | L | K | N | N | T | T | E | K | S | I | V | N |
| DENV2 | I | K | Q | N | T | T | E | T | T | V | V | N |
| DENV3 | Q | K | Q | N | I | T | E | Q | T | I | V | N |
| DENV4 | T | K | E | N | I | T | E | S | T | V | V | N |
| | Residue #* | | | | | | | | | | | |
| | 154 | 159 | 161 | 201 | 225 | 226 | 269 | 270 | 271 | 273 | 274 | 276 |
| Zika | E | K | E | N | G | T | E | M | D | A | K | R |
| DENV1 | E | T | T | K | S | Q | Q | T | | G | T | T |
| DENV2 | D | E | K | N | Q | G | Q | M | | S | G | L |
| DENV3 | E | T | E | N | E | T | Q | N | | G | G | S |
| DENV4 | D | T | T | K | S | E | D | S | | D | G | H |

*Relative to DENV3 WT

TABLE 35
DENV4-ZIKV Z20 and Z3L1 Swaps

| | Residue #* | | | | | | | | | | | |
|---|---|---|---|---|---|---|---|---|---|---|---|---|
| | 46 | 47 | 52 | 67 | 68 | 69 | 84 | 120 | 138 | 140 | 151 | 153 |
| Zika | V | T | N | D | M | A | K | A | R | M | T | H |
| DENV1 | L | K | N | N | T | T | E | K | S | I | V | N |
| DENV2 | I | K | Q | N | T | T | E | T | T | V | V | N |
| DENV3 | Q | K | Q | N | I | T | E | Q | T | I | V | N |
| DENV4 | T | K | E | N | I | T | E | S | T | V | V | N |
| | Residue #* | | | | | | | | | | | |
| | 154 | 161 | 163 | 203 | 227 | 228 | 271 | 272 | 273 | 275 | 276 | 278 |
| Zika | E | K | E | N | G | T | E | M | D | A | K | R |
| DENV1 | E | T | T | K | S | Q | Q | T | | G | T | T |
| DENV2 | D | E | K | N | Q | G | Q | M | | S | G | L |
| DENV3 | E | T | E | N | E | T | Q | N | | G | G | S |
| DENV4 | D | T | T | K | S | E | D | S | | D | G | H |

*Relative to DENV4 WT

TABLE 36
Alignment of Zika-Dengue WT Sequences

| | Residue # | | | | | | | | | | | | | |
|---|---|---|---|---|---|---|---|---|---|---|---|---|---|---|
| | 1 | 2 | 3 | 4 | 5 | 6 | 7 | 8 | 9 | 10 | 11 | 12 | 13 | 14 |
| Zika WT | I | R | C | I | G | V | S | N | R | D | F | V | E | G |
| DENV1 WT | M | R | C | V | G | I | G | N | R | D | F | V | E | G |
| DENV2 WT | M | R | C | I | G | I | S | N | R | D | F | V | E | G |
| DENV3 WT | M | R | C | V | G | I | G | N | R | D | F | V | E | G |
| DENV4 WT | M | R | C | V | G | V | G | N | R | D | F | V | E | G |
| | Residue # | | | | | | | | | | | | | |
| | 15 | 16 | 17 | 18 | 19 | 20 | 21 | 22 | 23 | 24 | 25 | 26 | 27 | 28 |
| Zika WT | M | S | G | G | T | W | V | D | V | V | L | E | H | G |
| DENV1 WT | L | S | G | A | T | W | V | D | V | V | L | E | H | G |
| DENV2 WT | V | S | G | G | S | W | V | D | I | V | L | E | H | G |
| DENV3 WT | L | S | G | A | T | W | V | D | V | V | L | E | H | G |
| DENV4 WT | V | S | G | G | A | W | V | D | L | V | L | E | H | G |
| | Residue # | | | | | | | | | | | | | |
| | 29 | 30 | 31 | 32 | 33 | 34 | 35 | 36 | 37 | 38 | 39 | 40 | 41 | 42 |
| Zika WT | G | C | V | T | V | M | A | Q | D | K | P | T | V | D |
| DENV1 WT | S | C | V | T | T | M | A | K | D | K | P | T | L | D |
| DENV2 WT | S | C | V | T | T | M | A | K | N | K | P | T | L | D |
| DENV3 WT | G | C | V | T | T | M | A | K | N | K | P | T | L | D |
| DENV4 WT | G | C | V | T | T | M | A | Q | G | K | P | T | L | D |
| | Residue # | | | | | | | | | | | | | |
| | 43 | 44 | 45 | 46 | 47 | 48 | 49 | 50 | 51 | 52 | 53 | 54 | 55 | 56 |
| Zika WT | I | E | L | V | T | T | T | V | S | N | M | A | E | V |
| DENV1 WT | I | E | L | L | K | T | E | V | T | N | P | A | V | L |
| DENV2 WT | F | E | L | I | K | T | E | A | K | Q | P | A | T | L |
| DENV3 WT | I | E | L | Q | K | T | E | A | T | Q | L | A | T | L |
| DENV4 WT | F | E | L | T | K | T | T | A | K | E | V | A | L | L |
| | Residue # | | | | | | | | | | | | | |
| | 57 | 58 | 59 | 60 | 61 | 62 | 63 | 64 | 65 | 66 | 67 | 68 | 69 | 70 |
| Zika WT | R | S | Y | C | Y | E | A | S | I | S | D | M | A | S |
| DENV1 WT | R | K | L | C | I | E | A | K | I | S | N | T | T | T |
| DENV2 WT | R | K | Y | C | I | E | A | K | L | T | N | T | T | T |
| DENV3 WT | R | K | L | C | I | E | G | K | I | T | N | I | T | T |
| DENV4 WT | R | T | Y | C | I | E | A | S | I | S | N | I | T | T |
| | Residue # | | | | | | | | | | | | | |
| | 71 | 72 | 73 | 74 | 75 | 76 | 77 | 78 | 79 | 80 | 81 | 82 | 83 | 84 |
| Zika WT | D | S | R | C | P | T | Q | G | E | A | Y | L | D | K |
| DENV1 WT | D | S | R | C | P | T | Q | G | E | A | T | L | V | E |
| DENV2 WT | E | S | R | C | P | T | Q | G | E | P | S | L | N | E |
| DENV3 WT | D | S | R | C | P | T | Q | G | E | A | V | L | P | E |
| DENV4 WT | A | T | R | C | P | T | Q | G | E | P | Y | L | K | E |
| | Residue # | | | | | | | | | | | | | |
| | 85 | 86 | 87 | 88 | 89 | 90 | 91 | 92 | 93 | 94 | 95 | 96 | 97 | 98 |
| Zika WT | Q | S | D | T | Q | Y | V | C | K | R | T | L | V | D |
| DENV1 WT | E | Q | D | T | N | F | V | C | R | R | T | F | V | D |
| DENV2 WT | E | Q | D | K | R | F | V | C | K | H | S | M | V | D |
| DENV3 WT | E | Q | D | Q | N | Y | V | C | K | H | T | Y | V | D |
| DENV4 WT | E | Q | D | Q | Q | Y | I | C | R | R | D | V | V | D |
| | Residue # | | | | | | | | | | | | | |
| | 99 | 100 | 101 | 102 | 103 | 104 | 105 | 106 | 107 | 108 | 109 | 110 | 111 | 112 |
| Zika WT | R | G | W | G | N | G | C | G | L | F | G | K | G | S |
| DENV1 WT | R | G | W | G | N | G | C | G | L | F | G | K | G | S |
| DENV2 WT | R | G | W | G | N | G | C | G | L | F | G | K | G | G |
| DENV3 WT | R | G | W | G | N | G | C | G | L | F | G | K | G | S |
| DENV4 WT | R | G | W | G | N | G | C | G | L | F | G | K | G | G |
| | Residue # | | | | | | | | | | | | | |
| | 113 | 114 | 115 | 116 | 117 | 118 | 119 | 120 | 121 | 122 | 123 | 124 | 125 | 126 |
| Zika WT | L | V | T | C | A | K | F | A | C | S | K | K | M | T |
| DENV1 WT | L | I | T | C | A | K | F | K | C | V | T | K | L | E |
| DENV2 WT | I | V | T | C | A | M | F | T | C | K | K | N | M | E |
| DENV3 WT | L | V | T | C | A | K | F | Q | C | L | E | P | I | E |
| DENV4 WT | V | V | T | C | A | K | F | S | C | S | G | K | I | T |
| | Residue # | | | | | | | | | | | | | |
| | 127 | 128 | 129 | 130 | 131 | 132 | 133 | 134 | 135 | 136 | 137 | 138 | 139 | 140 |
| Zika WT | G | K | S | I | Q | P | E | N | L | E | Y | R | I | M |
| DENV1 WT | G | K | I | V | Q | Y | E | N | L | K | Y | S | V | I |
| DENV2 WT | G | K | V | V | Q | P | E | N | L | E | Y | T | I | V |
| DENV3 WT | G | K | V | V | Q | Y | E | N | L | K | Y | T | V | I |
| DENV4 WT | G | N | L | V | Q | I | E | N | L | E | Y | T | V | V |
| | Residue # | | | | | | | | | | | | | |
| | 141 | 142 | 143 | 144 | 145 | 146 | 147 | 148 | 149 | 150 | 151 | 152 | 153 | 154 |
| Zika WT | L | S | V | H | G | S | Q | H | S | G | M | I | V | N |
| DENV1 WT | V | T | V | H | T | G | D | Q | | | | | | H |
| DENV2 WT | V | T | P | H | S | G | E | E | | | | | | H |
| DENV3 WT | I | T | V | H | T | G | D | Q | | | | | | H |
| DENV4 WT | V | T | V | H | N | G | D | T | | | | | | H |
| | Residue # | | | | | | | | | | | | | |
| | 155 | 156 | 157 | 158 | 159 | 160 | 161 | 162 | 163 | 164 | 165 | 166 | 167 | 168 |
| Zika WT | D | T | G | H | E | T | D | E | N | R | A | K | V | E |
| DENV1 WT | Q | V | G | N | E | T | T | E | H | G | T | T | A | T |
| DENV2 WT | A | V | G | N | D | T | G | K | H | G | K | E | I | K |
| DENV3 WT | Q | V | G | N | E | | | T | Q | G | V | T | A | E |
| DENV4 WT | A | V | G | N | D | T | S | N | H | G | V | T | A | T |
| | Residue # | | | | | | | | | | | | | |
| | 169 | 170 | 171 | 172 | 173 | 174 | 175 | 176 | 177 | 178 | 179 | 180 | 181 | 182 |
| Zika WT | I | T | P | N | S | P | R | A | E | A | T | L | G | G |
| DENV1 WT | I | T | P | Q | A | P | T | S | E | I | Q | L | T | D |
| DENV2 WT | V | T | P | Q | S | S | I | T | E | A | E | L | T | G |
| DENV3 WT | I | T | P | Q | A | S | T | T | E | A | I | L | P | E |
| DENV4 WT | I | T | P | R | S | P | S | V | E | V | K | L | P | D |
| | Residue # | | | | | | | | | | | | | |
| | 183 | 184 | 185 | 186 | 187 | 188 | 189 | 190 | 191 | 192 | 193 | 194 | 195 | 196 |
| Zika WT | F | G | S | L | G | L | D | C | E | P | R | T | G | L |
| DENV1 WT | Y | G | A | L | T | L | D | C | S | P | R | T | G | L |
| DENV2 WT | Y | G | T | V | T | M | E | C | S | P | R | T | G | L |
| DENV3 WT | Y | G | T | L | G | L | E | C | S | P | R | T | G | L |
| DENV4 WT | Y | G | E | L | T | L | D | C | E | P | R | S | G | I |
| | Residue # | | | | | | | | | | | | | |
| | 197 | 198 | 199 | 200 | 201 | 202 | 203 | 204 | 205 | 206 | 207 | 208 | 209 | 210 |
| Zika WT | D | F | S | D | L | Y | Y | L | T | M | N | N | K | H |
| DENV1 WT | D | F | N | E | M | V | L | L | T | M | E | K | K | S |
| DENV2 WT | D | F | N | E | M | V | L | L | Q | M | E | N | K | A |
| DENV3 WT | D | F | N | E | M | I | L | L | T | M | K | N | K | A |
| DENV4 WT | D | F | N | E | M | I | L | M | K | M | K | K | K | T |
| | Residue # | | | | | | | | | | | | | |
| | 211 | 212 | 213 | 214 | 215 | 216 | 217 | 218 | 219 | 220 | 221 | 222 | 223 | 224 |
| Zika WT | W | L | V | H | K | E | W | F | H | D | I | P | L | P |
| DENV1 WT | W | L | V | H | K | Q | W | F | L | D | L | P | L | P |
| DENV2 WT | W | L | V | H | R | Q | W | F | L | D | L | P | L | P |
| DENV3 WT | W | M | V | H | R | Q | W | F | F | D | L | P | L | P |
| DENV4 WT | W | L | V | H | K | Q | W | F | L | D | L | P | L | P |
| | Residue # | | | | | | | | | | | | | |
| | 225 | 226 | 227 | 228 | 229 | 230 | 231 | 232 | 233 | 234 | 235 | 236 | 237 | 238 |
| Zika WT | W | H | A | G | A | D | T | G | T | P | H | W | N | N |
| DENV1 WT | W | T | S | G | A | S | T | S | Q | E | T | W | N | R |
| DENV2 WT | W | L | P | G | A | D | T | Q | G | S | N | W | I | Q |
| DENV3 WT | W | T | S | G | A | T | T | E | T | P | T | W | N | R |
| DENV4 WT | W | T | A | G | A | D | T | S | E | V | H | W | N | Y |
| | Residue # | | | | | | | | | | | | | |
| | 239 | 240 | 241 | 242 | 243 | 244 | 245 | 246 | 247 | 248 | 249 | 250 | 251 | 252 |
| Zika WT | K | E | A | L | V | E | F | K | D | A | H | A | K | R |
| DENV1 WT | Q | D | L | L | V | T | F | K | T | A | H | A | K | K |
| DENV2 WT | K | E | T | L | V | T | F | K | N | P | H | A | K | K |
| DENV3 WT | K | E | L | L | V | T | F | K | N | A | H | A | K | K |
| DENV4 WT | K | E | R | M | V | T | F | K | V | P | H | A | K | R |
| | Residue # | | | | | | | | | | | | | |
| | 253 | 254 | 255 | 256 | 257 | 258 | 259 | 260 | 261 | 262 | 263 | 264 | 265 | 266 |
| Zika WT | Q | T | V | V | V | L | G | S | Q | E | G | A | V | H |
| DENV1 WT | Q | E | V | V | V | L | G | S | Q | E | G | A | M | H |
| DENV2 WT | Q | D | V | V | V | L | G | S | Q | E | G | A | M | H |
| DENV3 WT | Q | E | V | V | V | L | G | S | Q | E | G | A | M | H |
| DENV4 WT | Q | D | V | T | V | L | G | S | Q | E | G | A | M | H |
| | Residue # | | | | | | | | | | | | | |
| | 267 | 268 | 269 | 270 | 271 | 272 | 273 | 274 | 275 | 276 | 277 | 278 | 279 | 280 |
| Zika WT | T | A | L | A | G | A | L | E | A | E | M | D | G | A |
| DENV1 WT | T | A | L | T | G | A | T | E | I | Q | T | S | G | T |
| DENV2 WT | T | A | L | T | G | A | T | E | I | Q | M | S | S | G |
| DENV3 WT | T | A | L | T | G | A | T | E | I | Q | N | S | G | G |
| DENV4 WT | S | A | L | A | G | A | T | E | V | D | S | G | D | G |
| | Residue # | | | | | | | | | | | | | |
| | 281 | 282 | 283 | 284 | 285 | 286 | 287 | 288 | 289 | 290 | 291 | 292 | 293 | 294 |
| Zika WT | K | G | R | L | S | S | G | H | L | K | C | R | L | K |
| DENV1 WT | T | | T | I | F | A | G | H | L | K | C | R | L | K |
| DENV2 WT | N | | L | L | F | T | G | H | L | K | C | R | L | R |
| DENV3 WT | T | | S | I | F | A | G | H | L | K | C | R | L | K |
| DENV4 WT | N | | H | M | F | A | G | H | L | K | C | K | V | R |
| | Residue # | | | | | | | | | | | | | |
| | 295 | 296 | 297 | 298 | 299 | 300 | 301 | 302 | 303 | 304 | 305 | 306 | 307 | 308 |
| Zika WT | M | D | K | L | R | L | K | G | V | S | Y | S | L | C |
| DENV1 WT | M | D | K | L | T | L | K | G | M | S | Y | V | M | C |
| DENV2 WT | M | D | K | L | Q | L | K | G | M | S | Y | S | M | C |
| DENV3 WT | M | D | K | L | E | L | K | G | M | S | Y | A | M | C |
| DENV4 WT | M | E | K | L | R | I | K | G | M | S | Y | T | M | C |
| | Residue # | | | | | | | | | | | | | |
| | 309 | 310 | 311 | 312 | 313 | 314 | 315 | 316 | 317 | 318 | 319 | 320 | 321 | 322 |
| Zika WT | T | A | A | F | T | F | T | K | I | P | A | E | T | L |
| DENV1 WT | T | G | S | F | K | L | E | K | E | V | A | E | T | Q |
| DENV2 WT | T | G | K | F | K | V | V | K | E | I | A | E | T | Q |
| DENV3 WT | T | N | T | F | V | L | K | K | E | V | S | E | T | Q |
| DENV4 WT | S | G | K | F | S | I | D | K | E | M | A | E | T | Q |
| | Residue # | | | | | | | | | | | | | |
| | 323 | 324 | 325 | 326 | 327 | 328 | 329 | 330 | 331 | 332 | 333 | 334 | 335 | 336 |
| Zika WT | H | G | T | V | T | V | E | V | Q | Y | A | G | T | D |
| DENV1 WT | H | G | T | V | L | V | Q | V | K | Y | E | G | T | D |
| DENV2 WT | H | G | T | I | V | I | R | V | Q | Y | E | G | D | G |
| DENV3 WT | H | G | T | I | L | I | K | V | E | Y | K | G | E | D |
| DENV4 WT | H | G | T | T | V | V | K | V | K | Y | E | G | A | G |
| | Residue # | | | | | | | | | | | | | |
| | 337 | 338 | 339 | 340 | 341 | 342 | 343 | 344 | 345 | 346 | 347 | 348 | 349 | 350 |
| Zika WT | G | P | C | K | V | P | A | Q | M | A | V | D | M | Q |
| DENV1 WT | A | P | C | K | I | P | F | S | S | Q | D | E | K | G |
| DENV2 WT | S | P | C | K | I | P | F | E | I | M | D | L | E | K |
| DENV3 WT | A | P | C | K | I | P | F | S | T | E | D | G | Q | G |
| DENV4 WT | A | P | C | K | V | P | I | E | I | R | D | V | N | K |
| | Residue # | | | | | | | | | | | | | |
| | 351 | 352 | 353 | 354 | 355 | 356 | 357 | 358 | 359 | 360 | 361 | 362 | 363 | 364 |
| Zika WT | T | L | T | P | V | G | R | L | I | T | A | N | P | V |
| DENV1 WT | V | T | Q | | N | G | R | L | I | T | A | N | P | I |
| DENV2 WT | R | H | V | | L | G | R | L | I | T | V | N | P | I |
| DENV3 WT | K | A | H | | N | G | R | L | I | T | A | N | P | V |
| DENV4 WT | E | K | V | | V | G | R | V | I | S | S | T | P | L |
| | Residue # | | | | | | | | | | | | | |
| | 365 | 366 | 367 | 368 | 369 | 370 | 371 | 372 | 373 | 374 | 375 | 376 | 377 | 378 |
| Zika WT | I | T | E | S | T | E | N | S | K | M | M | L | E | L |
| DENV1 WT | V | T | D | K | E | | | K | P | V | N | I | E | A |
| DENV2 WT | V | T | E | K | D | | | S | P | V | N | I | E | A |
| DENV3 WT | V | T | K | K | E | | | E | P | V | N | I | E | A |
| DENV4 WT | A | E | N | T | N | | | S | V | T | N | I | E | L |
| | Residue # | | | | | | | | | | | | | |
| | 379 | 380 | 381 | 382 | 383 | 384 | 385 | 386 | 387 | 388 | 389 | 390 | 391 | 392 |
| Zika WT | D | P | P | F | G | D | S | Y | I | V | I | G | V | G |
| DENV1 WT | E | P | P | F | G | E | S | Y | I | V | V | G | A | G |
| DENV2 WT | E | P | P | F | G | D | S | Y | I | I | I | G | V | D |
| DENV3 WT | E | P | P | F | G | E | S | N | I | V | I | G | I | G |
| DENV4 WT | E | P | P | F | G | D | S | Y | I | V | I | G | V | G |

| | Residue # | | | | | | | | | | |
|---|---|---|---|---|---|---|---|---|---|---|---|
| | 393 | 394 | 395 | 396 | 397 | 398 | 399 | 400 | 401 | 402 | 403 |
| Zika WT | E | K | K | I | T | H | H | W | H | R | S |
| DENV1 WT | E | K | A | L | K | L | S | W | F | K | K |
| DENV2 WT | P | G | Q | L | K | L | N | W | F | K | K |
| DENV3 WT | D | N | A | L | K | I | N | W | Y | K | K |
| DENV4 WT | N | S | A | L | T | L | H | W | F | R | K |

TABLE 37
List of interaction sites of the three individual Fabs C10 with the E proteins in
the asymmetric unit in the ZIKV-CH pH 8 structure.

| C10 Fab | | | | | |
|---|---|---|---|---|---|
| | | Fab residue | | | |
| | | (H—Heavy chain, | | | |
| | | L—light chain, CDR | | | |
| | | loops and frame | E protein residues | | |
| | | work regions are | Molecules A, B, C in an asymmetric unit | | |
| | Main interacting | indicated in | indicated as A, B and C, respectively | | |
| Fab molecule | E protein dimer | brackets) | Intra-dimer | Inter-dimer | Inter-raft |
| I | A-C′ (near the | H-G53 (CDR2) | A-D278 | | |
| | 5 fold) | H-G54(CDR2) | A-276, A-D278 | | |
| | | H-K58 (CDR2) | C-A69 | | |
| | | H-Q61 (CDR2) | C-D67 | | |
| | | H-Q64 (CDR2) | C-D67 | | |
| | | H-R71 (FH3) | A-D278 | | |
| | | H-K96 (CDR3) | A-D155 | | |
| | | H-D98 | A-R2 | | |
| | | (CDR3) | | | |
| | | H-D99 | A-R2, A-V46, A- | | |
| | | (CDR3) | M140 | | |
| | | H-Y100 | A-R2, A-H27, A- | | |
| | | (CDR3) | V46, A-V47 | | |
| | | H-D100B (CDR3) | C-K251, | | |
| | | H-W100D (CDR3) | C-S70, C- | | |
| | | | K251, C-R252, | | |
| | | | C-R253 | | |
| | | H-F100E | C-S72, C- | | |
| | | (CDR3) | R99, C-G102, C- | | |
| | | | N103 | | |
| | | H-P100F | C-G102 | | |
| | | (CDR3) | | | |
| | | H-L100H (CDR3) | A-S149, A- | | |
| | | | G150, A-M151 | | |
| | | H-W1001 | A-G150, A-V153 | | |
| | | (CDR3) | | | |
| | | L-S26(CDR1) | C-R73 | | A-K297 |
| | | L-G27(CDR1) | C-Q77 | | |
| | | L-G28(CDR1) | C-R73, C-C74, C- | | A-K297 |
| | | | Q77 | | |
| | | L-F29(CDR1) | C-S72, C- | | |
| | | | R73, C-C74, C- | | |
| | | | N103 | | |
| | | L-N30(CDR1) | C-G104 | | |
| | | L-Y31(CDR1) | C-G102, C-N103 | | |
| | | L-Y48(FL2) | A-G150, A- | | |
| | | | M151, A-I152 | | |
| | | L-D49(CDR2) | A-M151 | | |
| | | L-T51(CDR2) | A-M151, A- | | |
| | | | N371, A-K373 | | |
| | | L-R53(CDR2) | A-E370, A-N371 | | |
| | | L-P54(CDR2) | A-V153 | | |
| | | L-V57(FL3) | A-N371 | | |
| | | L-S59(FL3) | A-E370 | | |
| | | L-K65(FL3) | | | A-R299 |
| | | L-S66(FL3) | | | A-L180, A- |
| | | | | | G181, A- |
| | | | | | G182, A- |
| | | | | | G184, A- |
| | | | | | R299 |
| | | L-G67(FL3) | | | A-G184, A- |
| | | | | | R299 |
| | | L-N68(FL3) | | | A-S185 |
| | | L-S92(CDR3) | C-S70, C-D71, C- | | |
| | | | S72, C-R73 | | |
| | | L-R93(CDR3) | C-A69, C-S70, C- | | |
| | | | D71, C-L82, C- | | |
| | | | D83, C-K84 | | |
| | | L-G94(CDR3) | C-S70 | | |
| II | A-C′ (near the | H-K58(CDR2) | A-M68, A-A69, | | |
| | 3-fold vertex) | | A-S70 | | |
| | | H-Q61(CDR2) | A-K84 | | |
| | | H-D99 | C-R2, C-V46, C- | | |
| | | (CDR3) | R138, C-M140, | | |
| | | H-Y100(CDR3) | A-H249, A- | | |
| | | | K251, C-H27, C- | | |
| | | | E44, C-V46, C- | | |
| | | | T47, C-R283 | | |
| | | H-D100B (CDR3) | A-R252, C-E276 | | |
| | | H-W100D (CDR3) | A-M68, A- | | |
| | | | S70, A-R252, A- | | |
| | | | Q253 | | |
| | | H-F100E (CDR3) | A-S72, A-D98, | | |
| | | | A-N103, A- | | |
| | | | L113, A-R252 | | |
| | | H-P100F (CDR3) | A-W101, A-G102 | | |
| | | H-L100H (CDR3) | A-G102, A- | | |
| | | | N103, A-G104, C- | | |
| | | | S149 | | |
| | | H-W100I(CDR3) | C-S149 | | |
| | | L-S26(CDR1) | A-R73 | B′-E55 | |
| | | L-S26A (CDR1) | A-R73 | | |
| | | L-D26B (CDR1) | A-R73 | | |
| | | L-G27(CDR1) | A-Q77 | | |
| | | L-G28(CDR1) | A-C74, A-Q77, A- | | |
| | | | C104, A-C105 | | |
| | | L-F29(CDR1) | A-S72, A-R73, A- | | |
| | | | C74, A-N103, A- | | |
| | | | G104 | | |
| | | L-N30(CDR1) | A-W101, A- | | |
| | | | N103, A-G104, A- | | |
| | | | C105, A-G106, | | |
| | | | C-K316 | | |
| | | L-Y31(CDR1) | A-G102, A- | | |
| | | | N103, A-G104 | | |
| | | L-Y48(FL2) | C-H148, C-S149 | | |
| | | L-D49(CDR2) | C-K316 | | |
| | | L-T51(CDR2) | C-T315, C- | | |
| | | | N371, C-K373 | | |
| | | L-S52(CDR2) | C-H148, C- | | |
| | | | S372, C-K373 | | |
| | | L-R53(CDR2) | C-T369, C-E370, | | |
| | | | C-N371 | | |
| | | L-S59(FL3) | C-T369, C-E370 | | |
| | | L-R60(FL3) | C-E370 | | |
| | | L-F61(CDR2) | C-E370 | | |
| | | L-S66(CDR2) | | B′-N52 | |
| | | L-G67(CDR2) | | B′-N52 | |
| | | L-S92(CDR3) | A-S70, A-D71, A- | | |
| | | | S72, A-R73 | | |
| | | L-R93(CDR3) | A-S70, A-D71, A- | | |
| | | | L82, A-D83, A- | | |
| | | | K84 | | |
| | | L-G94(CDR3) | A-S70 | | |
| III | B-B′(near the | H-N54(CDR2) | B-M277, B-R283 | | |
| | 2-fold vertex) | H-K58(CDR2) | B′-M68, B′-A69, | | |
| | | | B′-S70 | | |
| | | H-Q61(CDR2) | B′-K84 | | |
| | | H-Q64(CDR2) | B′-D67, B′-K84 | | |
| | | H-K96(CDR3) | B-R164 | | |
| | | H-D98(CDR3) | B-R2, B′-K251 | | |
| | | H-D99(CDR3) | B-R2, B-E44, B- | | |
| | | | V46, B-T47, B- | | |
| | | | M140, B-R164 | | |
| | | H-Y100 (CDR3) | B-H27, B- | | |
| | | | G28, B-E44, B- | | |
| | | | V46, B-T47, C- | | |
| | | | R283 | | |
| | | H-D100B (CDR3) | B′-R252, B- | | |
| | | | E276, B-R283 | | |
| | | H-W100D (CDR3) | B′-S70, B′- | | |
| | | | T115, B′-R252, | | |
| | | | B′-Q253 | | |
| | | H-F100E (CDR3) | B′-S72, B′- | | |
| | | | R99, B′-N103, | | |
| | | | B′-L113, B′- | | |
| | | | R252 | | |
| | | H-P100F (CDR3) | B′-N103 | | |
| | | H-L100H (CDR3) | B′-G102, B-S149 | | |
| | | H-W100I(CDR3) | B-S149 | | |
| | | L-S26(CDR3) | B′-R73, B′-Q77 | A-A229, A- | |
| | | | | D230 | |
| | | L-S26A (CDR1) | B′-R73 | | |
| | | L-G28(CDR1) | B′C74,, B′- | | |
| | | | Q77, B′-C105 | | |
| | | L-F29(CDR1) | B′-S72, B′- | | |
| | | | R73, B′-C74, B′- | | |
| | | | R99, B′-N103, B′- | | |
| | | | G104, B′-C105 | | |
| | | L-N30(CDR1) | B′-G104, B′- | | |
| | | | C105, B′-G106, | | |
| | | | B-K316 | | |
| | | L-Y31(CDR1) | B′-N103, B′- | | |
| | | | G104 | | |
| | | L-Y48(FL2) | B-H148, B-S149 | | |
| | | L-D49(CDR2) | B-S149, B-K316 | | |
| | | L-T51(CDR2) | B-T315, B-E329, | | |
| | | | B-Q331, B-K373 | | |
| | | L-S52(CDR2) | B-148, B-T315, | | |
| | | | B-E329, B- | | |
| | | | Q331, B-K373 | | |
| | | L-R53(CDR2) | B-148, B-E370, | | |
| | | | B-N371, B-K373 | | |
| | | L-V57(FL3) | B-T369 | | |
| | | L-T59(FL3) | B-T369, B-E370 | | |
| | | L-S66(FL3) | | A-N52 | |
| | | L-G67(FL3) | | A-N52 | |
| | | L-S92(CDR3) | B′-S70, B′- | | |
| | | | D71, B′-S72, B′- | | |
| | | | R73 | | |
| | | L-R93(CDR3) | B′-A69, B′- | | |
| | | | S70, B′-D71, B′- | | |
| | | | S72, B′-L82, B′- | | |
| | | | D83, B′-K84 | | |
| | | L-G94(CDR3) | B′D71 | | |

TABLE 38
The distances between the interacting residues of Fab C10 and
the E proteins at two sites at the inter-dimer interfaces of
the ZIKV-C10 complex structure at pH 8 and pH 5.

| Interacting residues | | | |
|---|---|---|---|
| | ZIKV E protein | Distances between the | |
| | Molecules A, B and | Fab and E protein at | |
| C10 Fab | C are indicated as A, | the interdimer interface. | |
| H—heavy clain | B and C, | ZIKV-C10 pH8 | ZIKV-C10 pH5 |
| L—light Chain | respectively. | structure | structure |
| L-G67 | B′-N52 | 6.3 Å | 6.5 Å |
| L-S26 | B′-A54 | 7.6 Å | 8.0 Å |
| L-G28 | B′-A54 | 8.0 Å | 9.6 Å |
| H-G67 | A-N52 | 6.1 Å | 6.9 Å |
| H-S26 | A-A54 | 7.9 Å | 8.9 Å |
| H-S26 | A-A229 | 7.4 Å | 7.6 Å |

TABLE 39
Construct name: ZIKV H/PF/2013 - EDE Null - Core and
EDE1-Specific Backbone: ZIXV H/PF/2013

| Position in ZIKV | ZIKV H/PF/2013 | TABV |
|---|---|---|
| Envelope Protein | Parental AA | Transplanted AA |
| 2 | R | H |
| 28 | G | D |
| 44 | E | T |
| 45 | L | V |
| 69 | A | E |
| 71 | D | R |
| 72 | S | A |
| 73 | R | K |
| 77 | Q | A |
| 82 | L | I |
| 102 | G | D |
| 103 | N | S |
| 106 | G | F |
| 148 | H | N |
| 151 | M | K |
| 163 | N | K |
| 251 | K | T |
| 252 | R | Y |
| 253 | Q | I |
| 254 | T | P |
| 276 | E | K |
| 316 | K | S |
| 317 | I | G |
| 329 | E | L |
| 331 | Q | G |

TABLE 40
Construct name: ZIKV H/PF/2013 - EDE Null - Core Only
Backbone: ZIXV H/PF/2013

| Position in ZIKV | ZIKV H/PF/2013 | TABV |
|---|---|---|
| Envelope Protein | Parental AA | Transplanted AA |
| 69 | A | E |
| 71 | D | R |
| 72 | S | A |
| 73 | R | K |
| 102 | G | D |
| 103 | N | S |
| 251 | K | T |
| 252 | R | Y |
| 253 | Q | I |
| 254 | T | P |

TABLE 41
Construct name: ZIKV H/PF/2013 - EDE Null - EDE1-Specific
Only Backbone: ZIXV H/PF/2013

| Position in ZIKV | ZIKV H/PF/2013 | TABV |
|---|---|---|
| Envelope Protein | Parental AA | Transplanted AA |
| 2 | R | H |
| 28 | G | D |
| 44 | E | T |
| 45 | L | V |
| 77 | Q | A |
| 82 | L | I |
| 106 | G | F |
| 148 | H | N |
| 151 | M | K |
| 163 | N | K |
| 276 | E | K |
| 316 | K | S |
| 317 | I | G |
| 329 | E | L |
| 331 | Q | G |

TABLE 42
Construct name: DENV1 WestPac74 - EDE Null - Core and
EDE1-Specific Backbone: ZIXV H/PF/2013

| Position in DENV-1 | DENV-1 Westpac74 | TABV |
|---|---|---|
| Envelope Protein | Parental AA | Transplanted AA |
| 2 | R | H |
| 28 | G | D |
| 44 | E | T |
| 45 | L | V |
| 69 | T | E |
| 71 | D | R |
| 72 | S | A |
| 73 | R | K |
| 77 | Q | A |
| 82 | L | I |
| 102 | G | D |
| 103 | N | S |
| 106 | G | F |
| 148 | Q | N |
| 150 | Q | K |
| 158 | H | K |
| 246 | K | T |
| 247 | K | Y |
| 248 | Q | I |
| 249 | E | P |
| 271 | Q | K |
| 310 | K | S |
| 311 | E | G |
| 323 | Q | L |
| 325 | K | G |

TABLE 43
Construct name: DENV1 WestPac74 - EDE Null - Core Only
Backbone: ZIXV H/PF/2013

| Position in DENV-1 | DENV-1 Westpac74 | TABV |
|---|---|---|
| Envelope Protein | Parental AA | Transplanted AA |
| 69 | T | E |
| 71 | D | R |
| 72 | S | A |
| 73 | R | K |
| 102 | G | D |
| 103 | N | S |
| 246 | K | T |
| 247 | K | Y |
| 248 | Q | I |
| 249 | E | P |

TABLE 44
Construct name: DENV1 WestPac74 - EDE Null - EDE1-Specific
Only Backbone: ZIXV H/PF/2013

| Position in DENV-1 | DENV-1 Westpac74 | TABV |
|---|---|---|
| Envelope Protein | Parental AA | Transplanted AA |
| 2 | R | H |
| 28 | G | D |
| 44 | E | T |
| 45 | L | V |
| 77 | Q | A |
| 82 | L | I |
| 106 | G | F |
| 148 | Q | N |
| 150 | Q | K |
| 158 | H | K |
| 271 | Q | K |
| 310 | K | S |
| 311 | E | G |
| 323 | Q | L |
| 325 | K | G |

The application's sequence listing, which the Patent Office published only in electronic form, follows.

SEQUENCE LISTING (97 sequences)

SEQ ID NO: 1 - protein, 3392 aa, Dengue virus type 1
MNNQRKKTGRPSFNMLKRARNRVSTVSQLAKRFSKGLLSGQGPMKLVMAFIAFLRFLAIPPTAGILARWGSFKKNGAIKVLRGFKKEISNMLNIMNRRKRSVTMLLMLLPTALAFHLTTRGGEPHMIVSKQERGKSLLFKTSAGVNMCTLIAMDLGELCEDTMTYKCPRITETEPDDVDCWCNATETWVTYGTCSQTGEHRRDKRSVALAPHVGLGLETRTETWMSSEGAWKQIQKVETWALRHPGFTVIALFLAHAIGTSITQKGIIFILLMLVTPSMAMRCVGIGNRDFVEGLSGATWVDVVLEHGSCVTTMAKDKPTLDIELLKTEVTNPAVLRKLCIEAKISNTTTDSRCPTQGEATLVEEQDTNFVCRRTFVDRGWGNGCGLFGKGSLITCAKFKCVTKLEGKIVQYENLKYSVIVTVHTGDQHQVGNETTEHGTTATITPQAPTSEIQLTDYGALTLDCSPRTGLDFNEMVLLTMEKKSWLVHKQWFLDLPLPWTSGASTSQETWNRQDLLVTFKTAHAKKQEVVVLGSQEGAMHTALTGATEIQTSGTTTIFAGHLKCRLKMDKLTLKGMSYVMCTGSFKLEKEVAETQHGTVLVQVKYEGTDAPCKIPFSSQDEKGVTQNGRLITANPIVTDKEKPVNIEAEPPFGESYIVVGAGEKALKLSWFKKGSSIGKMFEATARGARRMAILGDTAWDFGSIGGVFTSVGKLIHQIFGTAYGVLFSGVSWTMKIGIGILLTWLGLNSRSTSLSMTCIAVGMVTLYLGVMVQADSGCVINWKGRELKCGSGIFVTNEVHTWTEQYKFQADSPKRLSAAIGKAWEEGVCGIRSATRLENIMWKQISNELNHILLENDMKFTVVVGDVSGILAQGKKMIRPQPMEHKYSWKSWGKAKIIGADVQNTTFIIDGPNTPECPDNQRAWNIWEVEDYGFGIFTTNIWLKLRDSYTQVCDHRLMSAAIKDSKAVHADMGYWIESEKNETWKLARASFIEVKTCIWPKSHTLWSNGVLESEMIIPKIYGGPISQHNYRPGYFTQTAGPWHLGKLELDFDLCEGTTVVVDEHCGNRGPSLRTTTVTGKTIHEWCCRSCTLPPLRFKGEDGCWYGMEIRPVKEKEENLVKSMVSAGSGEVDSFSLGLLCISIMIEEVMRSRWSRKMLMTGTLAVFLLLTMGQLTWNDLIRLCIMVGANASDKMGMGTTYLALMATFRMRPMFAVGLLFRRLTSREVLLLTVGLSLVASVELPNSLEELGDGLAMGIMMLKLLTDFQSHQLWATLLSLTFVKTTFSLHYAWKTMAMILSIVSLFPLCLSTTSQKTTWLPVLLGSLGCKPLTMFLITENKIWGRKSWPLNEGIMAVGIVSILLSSLLKNDVPLAGPLIAGGMLIACYVISGSSADLSLEKAAEVSWEEEAEHSGASHNILVEVQDDGTMKIKDEERDDTLTILLKATLLAISGVYPMSIPATLFVWYFWQKKKQRSGVLWDTPSPPEVERAVLDDGIYRILQRGLLGRSQVGVGVFQEGVFHTMWHVTRGAVLMYQGKRLEPSWASVKKDLISYGGGWRFQGSWNAGEEVQVIAVEPGKNPKNVQTAPGTFKTPEGEVGAIALDFKPGTSGSPIVNREGKIVGLYGNGVVTTSGTYVSAIAQAKASQEGPLPEIEDEVFRKRNLTIMDLHPGSGKTRRYLPAIVREAIRRNVRTLVLAPTRVVASEMAEALKGMPIRYQTTAVKSEHTGKEIVDLMCHATFTMRLLSPVRVPNYNMIIMDEAHFTDPASIAARGYISTRVGMGEAAAIFMTATPPGSVEAFPQSNAVIQDEERDIPERSWNSGYDWITDFPGKTVWFVPSIKSGNDIANCLRKNGKRVVQLSRKTFDTEYQKTKNNDWDYVVTTDISEMGANFRADRVIDPRRCLKPVILKDGPERVILAGPMPVTVASAAQRRGRIGRNQNKEGDQYIYMGQPLNNDEDHAHWTEAKMLLDNINTPEGIIPALFEPEREKSAAIDGEYRLRGEARKTFVELMRRGDLPVWLSYKVASEGFQYSDRRWCFDGERNNQVLEENMDVEIWTKEGERKKLRPRWLDARTYSDPLALREFKEFAAGRRSVSGDLILEIGKLPQHLTQRAQNALDNLVMLHNSEQGGKAYRHAMEELPDTIETLMLLALIAVLTGGVTLFFLSGRGLGKTSIGLLCVIASSALLWMASVEPHWIAASIILEFFLMVLLIPEPDRQRTPQDNQLAYVVIGLLFMILTAAANEMGLLETTKKDLGIGHAAAENHHHAAMLDVDLHPASAWTLYAVATTIITPMMRHTIENTTANISLTAIANQAAILMGLDKGWPISKMDIGVPLLALGCYSQVNPLTLTAAVFMLVAHYAIIGPGLQAKATREAQKRTAAGIMKNPTVDGIVAIDLDPVVYDAKFEKQLGQIMLLILCTSQILLMRTTWALCESITLATGPLTTLWEGSPGKFWNTTIAVSMANIFRGSYLAGAGLAFSLMKSLGGGRRGTGAQGETLGEKWKRQLNQLSKSEFNTYKRSGIIEVDRSEAKEGLKRGEPTKHAVSRGTAKLRWFVERNLVKPEGKVIDLGCGRGGWSYYCAGLKKVTEVKGYTKGGPGHEEPIPMATYGWNLVKLYSGKDVFFTPPEKCDTLLCDIGESSPNPTIEEGRTLRVLKMVEPWLRGNQFCIKILNPYMPSVVETLEQMQRKHGGMLVRNPLSRNSTHEMYWVSCGTGNIVSAVNMTSRMLLNRFTMAHRKPTYERDVDLGAGTRHVAVEPEVANLDIIGQRIENIKNGHKSTWHYDEDNPYKTWAYHGSYEVKPSGSASSMVNGVVRLLTKPWDVIPMVTQIAMTDTTPFGQQRVFKEKVDTRTPKAKRGTAQIMEVTARWLWGFLSRNKKPRICTREEFTRKVRSNAAIGAVFVDENQWNSAKEAVEDERFWDLVHRERELHKQGKCATCVYNMMGKREKKLGEFGKAKGSRAIWYMWLGARFLEFEALGFMNEDHWFSRENSLSGVEGEGLHKLGYILRDISKIPGGNMYADDTAGWDTRITEDDLQNEAKITDIMEPEHALLATSIFKLTYQNKVVRVQRPAKNGTVMDVISRRDQRGSGQVGTYGLNTFTNMEAQLIRQMESEGIFSPSELETPNLAERVLDWLKKHGTERLKRMAISGDDCVVKPIDDRFATALTALNDMGKVRKDIPQWEPSKGWNDWQQVPFCSHHFHQLIMKDGREIVVPCRNQDELVGRARVSQGAGWSLRETACLGKSYAQMWQLMYFHRRDLRLAANAICSAVPVDWVPTSRTTWSIHAHHQWMTTEDMLSVWNRVWIEENPWMEDKTHVSSWEDVPYLGKREDRWCGSLIGLTARATWATNIQVAINQVRRLIGNENYLDFMTSMKRFKNESDPEGALW

SEQ ID NO: 2 - protein, 3391 aa, Dengue virus type 2
MNNQRKKARNTPFNMLKRERNRVSTVQQLTKRFSLGMLQGRGPLKLFMALVAFLRFLTIPPTAGILKRWGTIKKSKAINVLRGFRKEIGRMLNILNRRRRSAGMIIMLIPTVMAFHLTTRNGEPHMIVSRQEKGKSLLFKTEDGVNMCTLMAMDLGELCEDTITYNCPLLRQNEPEDIDCWCNSTSTWVTYGTCTTTGEHRREKRSVALVPHVGMGLETRTETWMSSEGAWKHAQRIETWILRHPGFTIMAAILAYTIGTTHFQRALIFILLTAVAPSMTMRCIGISNRDFVEGVSGGSWVDIVLEHGSCVTTMAKNKPTLDFELIKTEAKQPATLRKYCIEAKLTNTTTESRCPTQGEPSLNEEQDKRFVCKHSMVDRGWGNGCGLFGKGGIVTCAMFTCKKNMEGKVVQPENLEYTIVVTPHSGEEHAVGNDTGKHGKEIKVTPQSSITEAELTGYGTVTMECSPRTGLDFNEMVLLQMENKAWLVHRQWFLDLPLPWLPGADTQGSNWIQKETLVTFKNPHAKKQDVVVLGSQEGAMHTALTGATEIQMSSGNLLFTGHLKCRLRMDKLQLKGMSYSMCTGKFKVVKEIAETQHGTIVIRVQYEGDGSPCKIPFEIMDLEKRHVLGRLITVNPIVTEKDSPVNIEAEPPFGDSYIIIGVDPGQLKLNWFKKGSSIGQMFETTMRGAKRMAILGDTAWDFGSLGGVFTSIGKALHQVFGAIYGAAFSGVSWTMKILIGVIITWIGMNSRSTSLSVSLVLVGIVTLYLGVMVQADSGCVVSWKNKELKCGSGIFITDNVHTWTEQYKFQPESPSKLASAIQKAQEEGICGIRSVTRLENLMWKQITPELNHILAENEVKLTIMTGDIKGIMQAGKRSLRPQPTELKYSWKTWGKAKMLSTESHNQTFLIDGPETAECPNTNRAWNSLEVEDYGFGVFTTNIWLKLKEKQDAFCDSKLMSAAIKDNRAVHADMGYWIESALNDTWKIEKASFIEVKNCHWPKSHTLWSNGVLESEMIIPKNLAGPVSQHNYRPGYHTQIAGPWHLGKLEMDFDFCDGTTVVVTEDCGNRGPSLRTTTASGKLITEWCCRSCTLPPLRYRGEDGCWYGMEIRPLKEKEENLVNSLVTAGHGQVDNFSLGVLGMALFLEEMLRTRVGTKHAILLVAVSFVTLITGNMSFRDLGRVVVMVGATMTDDIGMGVTYLALLAAFKVRPTFAAGLLLRKLTSKELMMTTIGIVLLSQSTIPETILELTDALALGMMVLKMVRNMEKYQLAVTIMAILCVPNAVILQNAWKVSCTILAVVSVSPLLLTSSQQKTDWIPLALTIKGLNPTAIFLTTLSRTSKKRSWPLNEAIMAVGMVSILASSLLKNDIPMTGPLVAGGLLTVCYVLTGRSADLELERAADVKWEDQAEISGSSPILSITISEDGSMSIKNEEEEQTLTILIRTGLLVISGLFPVSIPITAAAWYLWEVKKQRAGVLWDVPSPPPMGKAELEDGAYRIKQKGILGYSQIGAGVYKEGTFHTMWHVTRGAVLMHKGKRIEPSWADVKKDLISYGGGWKLEGEWKEGEEVQVLALEPGKNPRAVQTKPGLFRTNAGTIGAVSLDFSPGTSGSPIIDKKGKVVGLYGNGVVTRSGAYVSAIAQTEKSIEDNPEIEDDIFRKRRLTIMDLHPGAGKTKRYLPAIVREAIKRGLRTLILAPTRVVAAEMEEALRGLPIRYQTPAIRAEHTGREIVDLMCHATFTMRLLSPVRVPNYNLIIMDEAHFTDPASIAARGYISTRVEMGEAAGIFMTATPPGSRDPFPQSNAPIIDEEREIPERSWNSGHEWVTDFKGKTVWFVPSIKAGNDIAACLRKNGKKVIQLSRKTFDSEYVKTRTNDWDFVVTTDISEMGANFKAERVIDPRRCMKPVILTDGEERVILAGPMPVTHSSAAQRRGRIGRNPKNENDQYIYMGEPLENDEDCAHWKEAKMLLDNINTPEGIIPSMFEPEREKVDAIDGEYRLRGEARKTFVDLMRRGDLPVWLAYKVAAEGINYADRRWCFDGIKNNQILEENVEVEIWTKEGERKKLKPRWLDARIYSDPLALKEFKEFAAGRKSLTLNLITEMGRLPTFMTQKARDALDNLAVLHTAEAGGRAYNHALSELPETLETLLLLTLLATVTGGIFLFLMSGRGIGKMTLGMCCIITASILLWYAQIQPHWIAASIILEFFLIVLLIPEPEKQRTPQDNQLTYVVIAILTVVAATMANEMGFLEKTKKDLGLGSIATQQPESNILDIDLRPASAWTLYAVATTFVTPMLRHSIENSSVNVSLTAIANQATVLMGLGKGWPLSKMDIGVPLLAIGCYSQVNPITLTAALLLLVAHYAIIGPGLQAKATREAQKRAAAGIMKNPTVDGITVIDLDPIPYDPKFEKQLGQVMLLVLCVTQVLMMRTTWALCEALTLATGPISTLWEGNPGRFWNTTIAVSMANIFRGSYLAGAGLLFSIMKNTTNTRRGTGNIGETLGEKWKSRLNALGKSEFQIYKKSGIQEVDRTLAKEGIKRGETDHHAVSRGSAKLRWFVERNMVTPEGKVVDLGCGRGGWSYYCGGLKNVREVKGLTKGGPGHEEPIPMSTYGWNLVRLQSGVDVFFIPPEKCDTLLCDIGESSPNPTVEAGRTLRVLNLVENWLNNNTQFCIKVLNPYMPSVIEKMETLQRKYGGALVRNPLSRNSTHEMYWVSNASGNIVSSVNMISRMLINRFTMRHKKATYEPDVDLGSGTRNIGIESEIPNLDIIGKRIEKIKQEHETSWHYDQDHPYKTWAYHGSYETKQTGSASSMVNGVVRLLTKPWDVVPMVTQMAMTDTTPFGQQRVFKEKVDTRTQEPKEGTKKLMKITAEWLWKELGKKKTPRMCTREEFTRKVRSNAALGAIFTDENKWKSAREAVEDSRFWELVDKERNLHLEGKCETCVYNMMGKREKKLGEFGKAKGSRAIWYMWLGARFLEFEALGFLNEDHWFSRENSLSGVEGEGLHKLGYILRDVSKKEGGAMYADDTAGWDTRITLEDLKNEEMVTNHMEGEHKKLAEAIFKLTYQNKVVRVQRPTPRGTVMDIISRRDQRGSGQVGTYGLNTFTNMEAQLIRQMEGEGVFKNIQHLTVTEEIAVQNWLARVGRERLSRMAISGDDCVVKPLDDRFASALTALNDMGKIRKDIQQWEPSRGWNDWTQVPFCSHHFHELIMKDGRVLVVPCRNQDELIGRARISQGAGWSLRETACLGKSYAQMWSLMYFHRRDLRLAANAICSAVPSHWVPTSRTTWSIHAKHEWMTTEDMLTVWNRVWIQENPWMEDKTPVESWEEIPYLGKREDQWCGSLIGLTSRATWAKNIQAAINQVRSLIGNEEYTDYMPSMKRFRREEEEAGVLW

SEQ ID NO: 3 - protein, 3390 aa, Dengue virus type 3
MNNQRKKTGKPSINMLKRVRNRVSTGPQLAKRFSKGLLNGQGPMKLVMAFIAFLRFLAIPPTAGVLARWGTFKKSGAIKVLKGFKKEISNMLSIINKRKKTSLCLMMILPAALAFHLTSRDGEPRMIVGKNERGKSLLFKTASGINMCTLIAMDLGEMCDDTVTYKCPHITEVEPEDIDCWCNLTSTWVTYGTCNQAGEHRRDKRSVALAPHVGMGLDTRTQTWMSAEGAWRQVEKVETWALRHPGFTILALFLAHYIGTSLTQKVVIFILLMLVTPSMTMRCVGIGNRDFVEGLSGATWVDVVLEHGGCVTTMAKNKPTLDIELQKTEATQLATLRKLCIEGKITNITTDSRCPTQGEAVLPEEQDQNYVCKHTYVDRGWGNGCGLFGKGSLVTCAKFQCLEPIEGKVVQYENLKYTVIITVHTGDQHQVGNETQGVTAEITPQASTTEAILPEYGTLGLECSPRTGLDFNEMILLTMKNKAWMVHRQWFFDLPLPWTSGATTETPTWNRKELLVTFKNAHAKKQEVVVLGSQEGAMHTALTGATEIQNSGGTSIFAGHLKCRLKMDKLELKGMSYAMCTNTFVLKKEVSETQHGTILIKVEYKGEDAPCKIPFSTEDGQGKAHNGRLITANPVVTKKEEPVNIEAEPPFGESNIVIGIGDNALKINWYKKGSSIGKMFEATARGARRMAILGDTAWDFGSVGGVLNSLGKMVHQIFGSAYTALFSGVSWVMKIGIGVLLTWIGLNSKNTSMSFSCIAIGIITLYLGAVVQADMGCVINWKGKELKCGSGIFVTNEVHTWTEQYKFQADSPKRLATAIAGAWENGVCGIRSTTRMENLLWKQIANELNYILWENNIKLTVVVGDTIGVLEQGKRTLTPQPMELKYSWKTWGKAKIVTAETQNSSFIIDGPNTPECPSASRAWNVWEVEDYGFGVFTTNIWLKLRDVYTQLCDHRLMSAAVKDERAVHADMGYWIESQKNGSWKLEKASLIEVKTCTWPKSHTLWSNGVLESDMIIPKSLAGPISQHNYRPGYHTQTAGPWHLGKLELDFNYCEGTTVVITENCGTRGPSLRTTTVSGKLIHEWCCRSCTLPPLRYMGEDGCWYGMEIRPISEKEENMVKSLVSAGSGKVDNFTMGVLCLAILFEEVMRGKFGKKHMIAGVLFTFVLLLSGQITWRDMAHTLIMIGSNASDRMGMGVTYLALIATFKIQPFLALGFFLRKLTSRENLLLGVGLAMATTLQLPEDIEQMANGIALGLMALKLITQFETYQLWTALVSLTCSNTILTLTVAWRTATLILAGVSLLPVCQSSSMRKTDWLPMTVAAMGVPPLPLFIFSLKDTLKRRSWPLNEGVMAVGLVSILASSLLRNDVPMAGPLVAGGLLIACYVITGTSADLTVEKAADVTWEEEAEQTGVSHNLMITVDDDGTMRIKDDETENILTVLLKTALLIVSGIFPYSIPATLLVWHTWQKQTQRSGVLWDVPSPPETQKAELEEGVYRIKQQGILGKTQVGVGVQKEGVFHTMWHVTRGAVLTHNGKRLEPNWASVKKDLISYGGGWRLSAQWQKGEEVQVIAVEPGKNPKNFQTMPGTFQTTTGEIGAIALDFKPGTSGSPIINREGKVVGLYGNGVVTKNGGYVSGIAQTNAEPDGPTPELEEEMFKKRNLTIMDLHPGSGKTRKYLPAIVREAIKRRLRTLILAPTRVVAAEMEEALKGLPIRYQTTATKSEHTGREIVDLMCHATFTMRLLSPVRVPNYNLIIMDEAHFTDPASIAARGYISTRVGMGEAAAIFMTATPPGTADAFPQSNAPIQDEERDIPERSWNSGNEWITDFAGKTVWFVPSIKAGNDIANCLRKNGKKVIQLSRKTFDTEYQKTKLNDWDFVVTTDISEMGANFKADRVIDPRRCLKPVILTDGPERVILAGPMPVTAASAAQRRGRVGRNPQKENDQYIFTGQPLNNDEDHAHWTEAKMLLDNINTPEGIIPALFEPEREKSAAIDGEYRLKGESRKTFVELMRRGDLPVWLAHKVASEGIKYTDRKWCFDGQRNNQILEENMDVEIWTKEGEKKKLRPRWLDARTYSDPLALKEFKDFAAGRKSIALDLVTEIGRVPSHLAHRTRNALDNLVMLHTSEHGGRAYRHAVEELPETMETLLLLGLMILLTGGAMLFLISGKGIGKTSIGLICVIASSGMLWMAEIPLQWIASAIVLEFFMMVLLIPEPEKQRTPQDNQLAYVVIGILTLAAIIAANEMGLLETTKRDLGMSKEPGVVSPTSYLDVDLHPASAWTLYAVATTVITPMLRHTIENSTANVSLAAIANQAVVLMGLDKGWPISKMDLGVPLLALGCYSQVNPLTLTAAVLLLITHYAIIGPGLQAKATREAQKRTAAGIMKNPTVDGIMTIDLDPVIYDSKFEKQLGQVMLLVLCAVQLLLMRTSWALCEALTLATGPITTLWEGSPGKFWNTTIAVSMANIFRGSYLAGAGLAFSIMKSVGTGKRGTGSQGETLGEKWKKKLNQLSRKEFDLYKKSGITEVDRTEAKEGLKRGEITHHAVSRGSAKLQWFVERNMVIPEGRVIDLGCGRGGWSYYCAGLKKVTEVRGYTKGGPGHEEPVPMSTYGWNIVKLMSGKDVFYLPPEKCDTLLCDIGESSPSPTVEESRTIRVLKMVEPWLKNNQFCIKVLNPYMPTVIEHLERLQRKHGGMLVRNPLSRNSTHEMYWISNGTGNIVSSVNMVSRLLLNRFTMTHRRPTIEKDVDLGAGTRHVNAEPETPNMDVIGERIKRIKEEHNSTWHYDDENPYKTWAYHGSYEVKATGSASSMINGVVKLLTKPWDVVPMVTQMAMTDTTPFGQQRVFKEKVDTRTPRPMPGTRKVMGITAEWLWRTLGRNKRPRLCTREEFTKKVRTNAAMGAVFTEENQWDSAKAAVEDEEFWKLVDRERELHKLGKCGSCVYNMMGKREKKLGEFGKAKGSRAIWYMWLGARYLEFEALGFLNEDHWFSRDNSYSGVEGEGLHKLGYILRDISKIPGGAMYADDTAGWDTRITEDDLHNEEKITQQMDPEHRQLANAIFKLTYQNKVVKVQRPTPTGTVMDIISRKDQRGSGQVGTYGLNTFTNMEVQLVRQMEGEGVLSKADLENPHLPEKKITQWLETKGVERLKRMAISGDDCVVKPIDDRFANALLALNDMGKVRKDIPQWQPSKGWHDWQQVPFCSHHFHELIMKDGRKLVVPCRPQDELIGRARISQGAGWSLRETACLGKAYAQMWSLMYFHRRDLRLASNAICSAVPVHWVPTSRTTWSIHAHHQWMTTEDMLTVWNRVWIEDNPWMEDKTPVTTWENVPYLGKREDQWCGSLIGLTSRATWAQNIPTAIQQVRSLIGNEEFLDYMPSMKRFRKEEESEGAIW

SEQ ID NO: 4 - protein, 3387 aa, Dengue virus type 4
MNQRKKVVRPPFNMLKRERNRVSTPQGLVKRFSTGLFSGKGPLRMVLAFITFLRVLSIPPTAGILKRWGQLKKNKAIKILIGFRKEIGRMLNILNGRKRSTITLLCLIPTVMAFHLSTRDGEPLMIVAKHERGRPLLFKTTEGINKCTLIAMDLGEMCEDTVTYKCPLLVNTEPEDIDCWCNLTSTWVMYGTCTQSGERRREKRSVALTPHSGMGLETRAETWMSSEGAWKHAQRVESWILRNPGFALLAGFMAYMIGQTGIQRTVFFVLMMLVAPSYGMRCVGVGNRDFVEGVSGGAWVDLVLEHGGCVTTMAQGKPTLDFELTKTTAKEVALLRTYCIEASISNITTATRCPTQGEPYLKEEQDQQYICRRDVVDRGWGNGCGLFGKGGVVTCAKFSCSGKITGNLVQIENLEYTVVVTVHNGDTHAVGNDTSNHGVTATITPRSPSVEVKLPDYGELTLDCEPRSGIDFNEMILMKMKKKTWLVHKQWFLDLPLPWTAGADTSEVHWNYKERMVTFKVPHAKRQDVTVLGSQEGAMHSALAGATEVDSGDGNHMFAGHLKCKVRMEKLRIKGMSYTMCSGKFSIDKEMAETQHGTTVVKVKYEGAGAPCKVPIEIRDVNKEKVVGRVISSTPLAENTNSVTNIELEPPFGDSYIVIGVGNSALTLHWFRKGSSIGKMFESTYRGAKRMAILGETAWDFGSVGGLFTSLGKAVHQVFGSVYTTMFGGVSWMIRILIGFLVLWIGTNSRNTSMAMTCIAVGGITLFLGFTVQADMGCVVSWSGRELKCGSGIFVVDNVHTWTEQYKFQPESPARLASAILNAHKDGVCGIRSTTRLENVMWKQITNELNYVLWEGGHDLTVVAGDVKGVLTKGKRALTPPVSDLKYSWKTWGKAKIFTPEARNSTFLIDGPDTSECPNERRAWNSLEVEDYGFGMFTTNIWMKFREGSSEVCDHRLMSAAIKDQKAVHADMGYWIESSKNQTWQIEKASLIEVKTCLWPKTHTLWSNGVLESQMLIPKSYAGPFSQHNYRQGYATQTVGPWHLGKLEIDFGECPGTTVTIQEDCDHRGPSLRTTTASGKLVTQWCCRSCTMPPLRFLGEDGCWYGMEIRPLSEKEENMVKSQVTAGQGTSETFSMGLLCLTLFVEECLRRRVTRKHMILVVVITLCAIILGGLTWMDLLRALIMLGDTMSGRIGGQIHLAIMAVFKMSPGYVLGVFLRKLTSRETALMVIGMAMTTVLSIPHDLMELIDGISLGLILLKIVTQFDNTQVGTLALSLTFIRSTMPLVMAWRTIMAVLFVVTLIPLCRTSCLQKQSHWVEITALILGAQALPVYLMTLMKGASRRSWPLNEGIMAVGLVSLLGSALLKNDVPLAGPMVAGGLLLAAYVMSGSSADLSLEKAANVQWDEMADITGSSPIIEVKQDEDGSFSIRDVEETNMITLLVKLALITVSGLYPLAIPITMTLWYMWQVKTQRSGALWDVPSPAATQKAALSEGVYRIMQRGLFGKTQVGVGIHMEGVFHTMWHVTRGSVICHETGRLEPSWADVRNDMISYGGGWRLGDKWDKEEDVQVLAIEPGKNPKHVQTKPGLFKTLTGEIGAVTLDFKPGTSGSPIINRKGKVIGLYGNGVVTKSGDYVSAITQAERIGEPDYEVDEDIFRKKRLTIMDLHPGAGKTKRILPSIVREALKRRLRTLILAPTRVVAAEMEEALRGLPIRYQTPAVKSEHTGREIVDLMCHATFTTRLLSSTRVPNYNLIVMDEAHFTDPSSVAARGYISTRVEMGEAAAIFMTATPPGATDPFPQSNSPIEDIEREIPERSWNTGFDWITDYQGKTVWFVPSIKAGNDIANCLRKSGKKVIQLSRKTFGTEYPKTKLTDWDFVVTTDISEMGANFRAGRVIDPRRCLKPVILTDGPERVILAGPIPVTPASAAQRRGRVGRNPAQEDDQYVFSGDPLKNDEDHAHWTEAKMLLDNIYTPEGIIPTLFGPEREKTQAIDGEFRLRGEQRKTFVELMRRGDLPVWLSYKVASAGISYKDREWCFTGERNNQILEENMEVEIWTREGEKKKLRPRWLDARVYADPMALKDFKEFASGRKSITLDILTEIASLPAYLSSRAKLALDNIVMLHTTERGGRAYQHALNELPESLETLMLVALLGAMTAGIFLFFMQGKGIGKLSMGLITIAVASGLLWIAEIQPQWIAASIILEFFLMVLLIPEPEKQRTPQDNQLIYVILTVLTIIGLIAANEMGLIEKTKTDFGFYQVKTETTILDVDLRPASAWTLYAVATTVLTPMLRHTIENTSANLSLAAIANQAAVLMGLGKGWPLHRMDLGVPLLAMGCYSQVNPTTLTASLVMLFVHYAIIGPGLQAKATREAQKRTAAGIMKNPTVDGITVIDLEPISYDPKFEKQLGQVMLLVLCAGQLLLMRTTWAFCEVLTLATGPILTLWEGNPGRFWNTTIAVSTANIFRGSYLAGAGLAFSLIKNAQTPRRGTGTTGETLGEKWKRQLNSLDRKEFEEYKRSGILEVDRTEAKSALKDGSKIKHAVSRGSSKIRWIVERGMVKPKGKVVDLGCGRGGWSYYMATLKNVTEVKGYTKGGPGHEEPIPMATYGWNLVKLHSGVDVFYKPTEQVDTLLCDIGESSSNPTIEEGRTLRVLKMVEPWLSSKPEFCIKVLNPYMPTVIEELEKLQRKHGGNLVRCPLSRNSTHEMYWVSGASGNIVSSVNTTSKMLLNRFTTRHRKPTYEKDVDLGAGTRSVSTETEKPDMTIIGRRLQRLQEEHKETWHYDQENPYRTWAYHGSYEAPSTGSASSMVNGVVKLLTKPWDVIPMVTQLAMTDTTPFGQQRVFKEKVDTRTPQPKPGTRMVMTTTANWLWALLGKKKNPRLCTREEFISKVRSNAAIGAVFQEEQGWTSASEAVNDSRFWELVDKERALHQEGKCESCVYNMMGKREKKLGEFGRAKGSRAIWYMWLGARFLEFEALGFLNEDHWFGRENSWSGVEGEGLHRLGYILEEIDKKDGDLMYADDTAGWDTRITEDDLQNEELITEQMAPHHKILAKAIFKLTYQNKVVKVLRPTPRGAVMDIISRKDQRGSGQVGTYGLNTFTNMEVQLIRQMEAEGVITQDDMQNPKGLKERVEKWLRECGVDRLKRMAISGDDCVVKPLDERFGTSLLFLNDMGKVRKDIPQWEPSKGWKNWQEVPFCSHHFHKIFMKDGRSLVVPCRNQDELIGRARISQGAGWSLRETACLGKAYAQMWSLMYFHRRDLRLASMAICSAVPTEWFPTSRTTWSIHAHHQWMTTEDMLKVWNRVWIEDNPNMTDKTPVHSWEDIPYLGKREDLWCGSLIGLSSRATWAKNIHTAITQVRNLIGKEEYVDYMPVMKRYSAPSESEGVL

SEQ ID NO: 5 - protein, 3423 aa, Zika virus
MKNPKKKSGGFRIVNMLKRGVARVSPFGGLKRLPAGLLLGHGPIRMVLAILAFLRFTAIKPSLGLINRWGSVGKKEAMEIIKKFKKDLAAMLRIINARKEKKRRGADTSVGIVGLLLTTAMAAEVTRRGSAYYMYLDRNDAGEAISFPTTLGMNKCYIQIMDLGHMCDATMSYECPMLDEGVEPDDVDCWCNTTSTWVVYGTCHHKKGEARRSRRAVTLPSHSTRKLQTRSQTWLESREYTKHLIRVENWIFRNPGFALAAAAIAWLLGSSTSQKVIYLVMILLIAPAYSIRCIGVSNRDFVEGMSGGTWVDVVLEHGGCVTVMAQDKPTVDIELVTTTVSNMAEVRSYCYEASISDMASDSRCPTQGEAYLDKQSDTQYVCKRTLVDRGWGNGCGLFGKGSLVTCAKFACSKKMTGKSIQPENLEYRIMLSVHGSQHSGMIVNDTGHETDENRAKVEITPNSPRAEATLGGFGSLGLDCEPRTGLDFSDLYYLTMNNKHWLVHKEWFHDIPLPWHAGADTGTPHWNNKEALVEFKDAHAKRQTVVVLGSQEGAVHTALAGALEAEMDGAKGRLSSGHLKCRLKMDKLRLKGVSYSLCTAAFTFTKIPAETLHGTVTVEVQYAGTDGPCKVPAQMAVDMQTLTPVGRLITANPVITESTENSKMMLELDPPFGDSYIVIGVGEKKITHHWHRSGSTIGKAFEATVRGAKRMAVLGDTAWDFGSVGGALNSLGKGIHQIFGAAFKSLFGGMSWFSQILIGTLLMWLGLNTKNGSISLMCLALGGVLIFLSTAVSADVGCSVDFSKKETRCGTGVFVYNDVEAWRDRYKYHPDSPRRLAAAVKQAWEDGICGISSVSRMENIMWRSVEGELNAILEENGVQLTVVVGSVKNPMWRGPQRLPVPVNELPHGWKAWGKSYFVRAAKTNNSFVVDGDTLKECPLKHRAWNSFLVEDHGFGVFHTSVWLKVREDYSLECDPAVIGTAVKGKEAVHSDLGYWIESEKNDTWRLKRAHLIEMKTCEWPKSHTLWTDGIEESDLIIPKSLAGPLSHHNTREGYRTQMKGPWHSEELEIRFEECPGTKVHVEETCGTRGPSLRSTTASGRVIEEWCCRECTMPPLSFRAKDGCWYGMEIRPRKEPESNLVRSMVTAGSTDHMDHFSLGVLVILLMVQEGLKKRMTTKIIISTSMAVLVAMILGGFSMSDLAKLAILMGATFAEMNTGGDVAHLALIAAFKVRPALLVSFIFRANWTPRESMLLALASCLLQTAISALEGDLMVLINGFALAWLAIRAMVVPRTDNITLAILAALTPLARGTLLVAWRAGLATCGGFMLLSLKGKGSVKKNLPFVMALGLTAVRLVDPINVVGLLLLTRSGKRSWPPSEVLTAVGLICALAGGFAKADIEMAGPMAAVGLLIVSYVVSGKSVDMYIERAGDITWEKDAEVTGNSPRLDVALDESGDFSLVEDDGPPMREIILKVVLMTICGMNPIAIPFAAGAWYVYVKTGKRSGALWDVPAPKEVKKGETTDGVYRVMTRRLLGSTQVGVGVMQEGVFHTMWHVTKGSALRSGEGRLDPYWGDVKQDLVSYCGPWKLDAAWDGHSEVQLLAVPPGERARNIQTLPGIFKTKDGDIGAVALDYPAGTSGSPILDKCGRVIGLYGNGVVIKNGSYVSAITQGRREEETPVECFEPSMLKKKQLTVLDLHPGAGKTRRVLPEIVREAIKTRLRTVILAPTRVVAAEMEEALRGLPVRYMTTAVNVTHSGTEIVDLMCHATFTSRLLQPIRVPNYNLYIMDEAHFTDPSSIAARGYISTRVEMGEAAAIFMTATPPGTRDAFPDSNSPIMDTEVEVPERAWSSGFDWVTDHSGKTVWFVPSVRNGNEIAACLTKAGKRVIQLSRKTFETEFQKTKHQEWDFVVTTDISEMGANFKADRVIDSRRCLKPVILDGERVILAGPMPVTHASAAQRRGRIGRNPNKPGDEYLYGGGCAETDEDHAHWLEARMLLDNIYLQDGLIASLYRPEADKVAAIEGEFKLRTEQRKTFVELMKRGDLPVWLAYQVASAGITYTDRRWCFDGTTNNTIMEDSVPAEVWTRHGEKRVLKPRWMDARVCSDHAALKSFKEFAAGKRGAAFGVMEALGTLPGHMTERFQEAIDNLAVLMRAETGSRPYKAAAAQLPETLETIMLLGLLGTVSLGIFFVLMRNKGIGKMGFGMVTLGASAWLMWLSEIEPARIACVLIVVFLLLVVLIPEPEKQRSPQDNQMAIIIMVAVGLLGLITANELGWLERTKSDLSHLMGRREEGATIGFSMDIDLRPASAWAIYAALTTFITPAVQHAVTTSYNNYSLMAMATQAGVLFGMGKGMPFYAWDFGVPLLMIGCYSQLTPLTLIVAIILLVAHYMYLIPGLQAAAARAAQKRTAAGIMKNPVVDGIVVTDIDTMTIDPQVEKKMGQVLLIAVAVSSAILSRTAWGWGEAGALITAATSTLWEGSPNKYWNSSTATSLCNIFRGSYLAGASLIYTVTRNAGLVKRRGGGTGETLGEKWKARLNQMSALEFYSYKKSGITEVCREEARRALKDGVATGGHAVSRGSAKLRWLVERGYLQPYGKVIDLGCGRGGWSYYAATIRKVQEVKGYTKGGPGHEEPMLVQSYGWNIVRLKSGVDVFHMAAEPCDTLLCDIGESSSSPEVEEARTLRVLSMVGDWLEKRPGAFCIKVLCPYTSTMMETLERLQRRYGGGLVRVPLSRNSTHEMYWVSGAKSNTIKSVSTTSQLLLGRMDGPRRPVKYEEDVNLGSGTRAVVSCAEAPNMKIIGNRIERIRSEHAETWFFDENHPYRTWAYHGSYEAPTQGSASSLINGVVRLLSKPWDVVTGVTGIAMTDTTPYGQQRVFKEKVDTRVPDPQEGTRQVMSMVSSWLWKELGKHKRPRVCTKEEFINKVRSNAALGAIFEEEKEWKTAVEAVNDPRFWALVDKEREHHLRGECQSCVYNMMGKREKKQGEFGKAKGSRAIWYMWLGARFLEFEALGFLNEDHWMGRENSGGGVEGLGLQRLGYVLEEMSRIPGGRMYADDTAGWDTRISRFDLENEALITNQMEKGHRALALAIIKYTYQNKVVKVLRPAEKGKTVMDIISRQDQRGSGQVVTYALNTFTNLVVQLIRNMEAEEVLEMQDLWLLRRSEKVTNWLQSNGWDRLKRMAVSGDDCVVKPIDDRFAHALRFLNDMGKVRKDTQEWKPSTGWDNWEEVPFCSHHFNKLHLKDGRSIVVPCRHQDELIGRARVSPGAGWSIRETACLAKSYAQMWQLLYFHRRDLRLMANAICSSVPVDWVPTGRTTWSIHGKGEWMTTEDMLVVWNRVWIEENDHMEDKTPVTKWTDIPYLGKREDLWCGSLIGHRPRTTWAENIKNTVNMVRRIIGDEEKYMDYLSTQVRYLGEEGSTPGVL

SEQ ID NO: 6 - protein, 3350 aa, Tamana bat virus
MNKNKKQKPNTKMRSNPQKNKIKLVNKKLQTFFMAFFQILLAVFKNFKVSLQLRFLEKVYRTVFKNLAIRSPKGAVAIMKWGVGYLKKRKQKRQKSSGGYEIEAARQALYPITLGVMVIFCGYQSGNEPVCVDFNNQTNIVPYENGKVIFGNVTIVPPIDRFGLLIPTDNYDTIECVRMSPGIELSEEVCGFMGPKYDVLLRTQWGKRETEHMHRTRRSVTETTHESSGGEHWDYSEYLTDFEHKMSKYKMPVLIILVGYLVLKTQNMALLIILVIAQFYLADAGHCHDPEKFDIIEAGGYTKMTTFLKHDKCFMVRVPEHDVVEITVVKKTIRPTTGCKTFLLGASVNTESRAKCPGAGSATIPKTPGDKTFCHIEHVDRGWDSGCFIFGKGEVVTCAAVTYSKPFYAWMVDSEQITWEVEVNFGGDSNRKKTAEISMDSEYEEFEDPKNTGSKIRLYCKTPRQEWDNYYMVARPGGSLYKVRRELINDLNLPWTDFKYPYVTTTIVRNGESILRFKRPTMTYIPVTVAAGLERLYMDVVLQGPVLKCSGNHCTKEQWSGNSETELPTITEDVGTLKCEIDYSGLKVRVTNVALCTHTSTIVSGPLVTNDIVMIVLRGTGSDTTECKLKVEGKSASSNNWITNYCAPHSRSMSVKPNEQTTVKMTCPNGIIDLRFNGKTTTQVEVKYSRTMKLVSSMMASFKDVTENVMIHESGFETFKKVAKMLTTPVVGFFKSILGLASNWYILIFALLLVYVGVNKQGPVGNIMLALGLICLLTYYFEVVAADKYVLMVDTDDMSLSVGKAHHIEWDWKITMPLIPSLPYQVTLIGLDPKYGITIYRVDSQEEYTNLAKVLSEKYDLVRKITGWYGNSWIKVPCRVIASDAALNLTADCEKAISENSKVAVLTSEHTPIVCRDCIEKFVKLSLDKEEQGAFRNHKHYNFQNLTREECVIDGNWTYSSAIEVYSKYELENEDEITTTQGGGYGTITIGEKTWKYVEVKFGPISVKNTILFQGVLDSVVPTKRKWVNMTNWACNFFKKENQVNRGHILAKSLGGPAAGYNCMIQLVKENNEDEDIEKSALDSALKQSTSYRREIKPKNIKAIYYTQKVDERNIMCGWNGKDSVNVVKASKMNKDNIQDLITKNLNVLMVIDNNDESSIRALIGDKMLFCEANWVDCNTHDYELSFWTSALITTKSRSYEHKPCKIQPKDEIFEDADSFFSDEKVVLTTAGISRDNVNFYWLFTFFLGWILFEWAVIVDLGSIFLYNIKKRWTVLLIIPTVFQLMVNGIITSIVSITVFFCGSMKNTLVTATDIVEGINLGHWKRTAMVTLMVSGFFKNEFLSLLMILNFTLNWTHFVPILMCLPHFLGLPNPWIWLGVLVLALIGLTNGKLELDFQNKLVPLPQKKFETQLQLGKVYWTASGIEVEIREEIRMAKYDYPLLALYLTLVFSASLIHWSFGITTLMLGGSLFNLRDKSKGLIPMPELEEVHDPPEKLKDGFYSISVAGLCWKYQIGIGYVHNGTLTTQYHVTCGRDLWWKGKSYSPVEENVVSDYACYFGPWSFPKLQEGSEFTIMMRWKNIALKTMGKITGNYYAIPTEKIPKGQSGTPIFQEINGTLKPVALAGNSIVFGGESVQVGENPSFAPHLDGKIKQLLNTRGCWEEFVLKCGAGKTRGVIKDTIQHATRMGVKVLVLVPTRVVANEAYNVLKDVGTVGIQTSTYRNDVGLMHTIMCHSTFARRIMRKGKRILRNWQLIIVDESHFCNPETLALHNLFMRDLRSPTPTYSVMYLTATGYTSYDSNSNFFVHDHPVASKNDFLEIIKQNKEKKIVYFVASGPEANEIAGKLRAEIQNIIIVTRQTFNNTYEAAKTMEQGLILTTNISEMGANYNADIVMDPLEEIIPVLGEEGVQLEKTVCTRASKIQRRGRVGRSKPGDYYYLAVNEGQINQQMHHQQDIVWAEAEMCSNLMGEIWEPENFQGSEPPAPINYYLTPQKLATIVNKTEMENGWTYYTSYHLTDDYGNSIPYNVTDPQLHYTPNHCPKCTGLHFPVWDERNHDMLVSCGRDLDNNDVNTRTRQNVGVIQPLVQRVFSGIRMQSSGEGCELFSILFGVQCYGWMTYFDMPASWIALAHQALPPQWRETITPMKLLFILFGFMLKVVYDKIMVNKHLVYNYAPYKGHSQMLMFLTVASTMLQNEALKIMSYPIWQILFVVFITVIVVETVCGITQREKSTGEVTQLVTIGAVIFIIYYILADGEILTLIKKLIKVKIQQIENNYEVPQQPIEDTRIRTWSLFDRPPVYLYFTLHPVIIQLARSTSVKALIQFVDNVKLRKTPVNMPQPTVYFIVAVFISIFNFYYYSFPHLVASIIPSILLYCVIYCAHYTDIFKRFVDTNHELGNSNNQHIPYSDPAYSEIYRVLVIVIEITYLLVYKTLTLDSVLVVLHMTSPWIRGPIGEGLNNYGVVILAMSMKHLMIPQSIVAITAVVLDHLKTTQRFRSSIFTTQILNRMVEHYQDLEWRGRQYKFTLNKLNKHDFLQFKGENVYELENKDDFPSRGFAKMDWMIKSTLFQPRGFVVDGGCGAGGFSARMCFEKPVAKILGYTIGKDKHHTPDLNGKKVYKKFNWEIGDLFKKRIRCDTFVMDIGESHPNQEIEAIGDLKRLNWFKENVDCKNWCIKIMVPTHEQVLHALPKGSTLIRNPWSRNSTLEMYCVPGSNEPGRMVSNVIKVLNQRINRTSWQGSIMKKLYYPEDEEQVGSTKVNYIIEKEKLQNFTLQEERRVFNHWKCLGSVEASRKGSSGQNYNSIITAITSGLRKVVPSIEHWMLTSTKPEDTFSTFLRKVDQPPQPLGNYKSEFQEKFKWVQQWYKSKNKHGRILTNEEVISKFKSDGALGFRCQHYGSIQEALENPNFFKDLEAEEINHLHGKCTRGVFDVIGKKEKKDLYGKPKGSRLIMYLDLVERFLEHKYLGFLNSDHWCHPENLPSGVSAVSPYEYPRMIVEKCKIDPRSDLMENWVIQDDTAGWDTRLHDDVLECEQSFLCDFAESEEHIKHILRIYKNYRNPMIKLTDDSGTRDLILIGKGQRCSGTVVTYSMNTITNTVVQMMRMQEVLELSNEECLHKMMVSGDDCLLVLKPEEAIKVSKSLKFINSTGFIRKDVPRHVPSPVVKDWKNISFCSHGIAKGRMQNGEYLWTLGKNEAEIIGKAQLQIGAFGDEINEQSQAKAMALYLLLTFPMRRDIRLIAKAIMACCQEGLVPMGKVKEPLIWGEPWLDSMDIVNIINKIYGTNFYTLEEVPYVRHSLDMERGSTIHTNERSNWKKFLLEKMVPDLSRRNNTAPNMNWLVRNGNRGNLLV

SEQ ID NO: 7 - protein, 3423 aa, Artificial
  ZIKV/DENV 5J7
MKNPKKKSGGFRIVNMLKRGVARVSPFGGLKRLPAGLLLGHGPIRMVLAILAFLRFTAIKPSLGLINRWGSVGKKEAMEIIKKFKKDLAAMLRIINARKEKKRRGADTSVGIVGLLLTTAMAAEVTRRGSAYYMYLDRNDAGEAISFPTTLGMNKCYIQIMDLGHMCDATMSYECPMLDEGVEPDDVDCWCNTTSTWVVYGTCHHKKGEARRSRRAVTLPSHSTRKLQTRSQTWLESREYTKHLIRVENWIFRNPGFALAAAAIAWLLGSSTSQKVIYLVMILLIAPAYSIRCIGVSNRDFVEGMSGGTWVDVVLEHGGCVTVMAQDKPTVDIELVTTEATQLATLRKLCIEGSISDMASDSRCPTQGEAYLDKQSDTQYVCKRTLVDRGWGNGCGLFGKGSLVTCAKFACLEPIEGKVVQYENLEYRIMLSVHGSQHSGMIVNDTGHETDENRAKVEITPNSPRAEATLGGFGSLGLDCEPRTGLDFSEMIILTMKNKAWMVHRQWFFDLPLPWTSGATTETPTWNNKEALVEFKDAHAKRQTVVVLGSQEGAVHTALAGALEIQMNSGGTSIFAGHLKCRLKMDKLRLKGVSYSLCTAAFTFTKIPAETLHGTVTVEVQYAGTDGPCKVPAQMAVDMQTLTPVGRLITANPVITESTENSKMMLELDPPFGDSYIVIGVGEKKITHHWHRSGSTIGKAFEATVRGAKRMAVLGDTAWDFGSVGGALNSLGKGIHQIFGAAFKSLFGGMSWFSQILIGTLLMWLGLNTKNGSISLMCLALGGVLIFLSTAVSADVGCSVDFSKKETRCGTGVFVYNDVEAWRDRYKYHPDSPRRLAAAVKQAWEDGICGISSVSRMENIMWRSVEGELNAILEENGVQLTVVVGSVKNPMWRGPQRLPVPVNELPHGWKAWGKSYFVRAAKTNNSFVVDGDTLKECPLKHRAWNSFLVEDHGFGVFHTSVWLKVREDYSLECDPAVIGTAVKGKEAVHSDLGYWIESEKNDTWRLKRAHLIEMKTCEWPKSHTLWTDGIEESDLIIPKSLAGPLSHHNTREGYRTQMKGPWHSEELEIRFEECPGTKVHVEETCGTRGPSLRSTTASGRVIEEWCCRECTMPPLSFRAKDGCWYGMEIRPRKEPESNLVRSMVTAGSTDHMDHFSLGVLVILLMVQEGLKKRMTTKIIISTSMAVLVAMILGGFSMSDLAKLAILMGATFAEMNTGGDVAHLALIAAFKVRPALLVSFIFRANWTPRESMLLALASCLLQTAISALEGDLMVLINGFALAWLAIRAMVVPRTDNITLAILAALTPLARGTLLVAWRAGLATCGGFMLLSLKGKGSVKKNLPFVMALGLTAVRLVDPINVVGLLLLTRSGKRSWPPSEVLTAVGLICALAGGFAKADIEMAGPMAAVGLLIVSYVVSGKSVDMYIERAGDITWEKDAEVTGNSPRLDVALDESGDFSLVEDDGPPMREIILKVVLMTICGMNPIAIPFAAGAWYVYVKTGKRSGALWDVPAPKEVKKGETTDGVYRVMTRRLLGSTQVGVGVMQEGVFHTMWHVTKGSALRSGEGRLDPYWGDVKQDLVSYCGPWKLDAAWDGHSEVQLLAVPPGERARNIQTLPGIFKTKDGDIGAVALDYPAGTSGSPILDKCGRVIGLYGNGVVIKNGSYVSAITQGRREEETPVECFEPSMLKKKQLTVLDLHPGAGKTRRVLPEIVREAIKTRLRTVILAPTRVVAAEMEEALRGLPVRYMTTAVNVTHSGTEIVDLMCHATFTSRLLQPIRVPNYNLYIMDEAHFTDPSSIAARGYISTRVEMGEAAAIFMTATPPGTRDAFPDSNSPIMDTEVEVPERAWSSGFDWVTDHSGKTVWFVPSVRNGNEIAACLTKAGKRVIQLSRKTFETEFQKTKHQEWDFVVTTDISEMGANFKADRVIDSRRCLKPVILDGERVILAGPMPVTHASAAQRRGRIGRNPNKPGDEYLYGGGCAETDEDHAHWLEARMLLDNIYLQDGLIASLYRPEADKVAAIEGEFKLRTEQRKTFVELMKRGDLPVWLAYQVASAGITYTDRRWCFDGTTNNTIMEDSVPAEVWTRHGEKRVLKPRWMDARVCSDHAALKSFKEFAAGKRGAAFGVMEALGTLPGHMTERFQEAIDNLAVLMRAETGSRPYKAAAAQLPETLETIMLLGLLGTVSLGIFFVLMRNKGIGKMGFGMVTLGASAWLMWLSEIEPARIACVLIVVFLLLVVLIPEPEKQRSPQDNQMAIIIMVAVGLLGLITANELGWLERTKSDLSHLMGRREEGATIGFSMDIDLRPASAWAIYAALTTFITPAVQHAVTTSYNNYSLMAMATQAGVLFGMGKGMPFYAWDFGVPLLMIGCYSQLTPLTLIVAIILLVAHYMYLIPGLQAAAARAAQKRTAAGIMKNPVVDGIVVTDIDTMTIDPQVEKKMGQVLLIAVAVSSAILSRTAWGWGEAGALITAATSTLWEGSPNKYWNSSTATSLCNIFRGSYLAGASLIYTVTRNAGLVKRRGGGTGETLGEKWKARLNQMSALEFYSYKKSGITEVCREEARRALKDGVATGGHAVSRGSAKLRWLVERGYLQPYGKVIDLGCGRGGWSYYAATIRKVQEVKGYTKGGPGHEEPMLVQSYGWNIVRLKSGVDVFHMAAEPCDTLLCDIGESSSSPEVEEARTLRVLSMVGDWLEKRPGAFCIKVLCPYTSTMMETLERLQRRYGGGLVRVPLSRNSTHEMYWVSGAKSNTIKSVSTTSQLLLGRMDGPRRPVKYEEDVNLGSGTRAVVSCAEAPNMKIIGNRIERIRSEHAETWFFDENHPYRTWAYHGSYEAPTQGSASSLINGVVRLLSKPWDVVTGVTGIAMTDTTPYGQQRVFKEKVDTRVPDPQEGTRQVMSMVSSWLWKELGKHKRPRVCTKEEFINKVRSNAALGAIFEEEKEWKTAVEAVNDPRFWALVDKEREHHLRGECQSCVYNMMGKREKKQGEFGKAKGSRAIWYMWLGARFLEFEALGFLNEDHWMGRENSGGGVEGLGLQRLGYVLEEMSRIPGGRMYADDTAGWDTRISRFDLENEALITNQMEKGHRALALAIIKYTYQNKVVKVLRPAEKGKTVMDIISRQDQRGSGQVVTYALNTFTNLVVQLIRNMEAEEVLEMQDLWLLRRSEKVTNWLQSNGWDRLKRMAVSGDDCVVKPIDDRFAHALRFLNDMGKVRKDTQEWKPSTGWDNWEEVPFCSHHFNKLHLKDGRSIVVPCRHQDELIGRARVSPGAGWSIRETACLAKSYAQMWQLLYFHRRDLRLMANAICSSVPVDWVPTGRTTWSIHGKGEWMTTEDMLVVWNRVWIEENDHMEDKTPVTKWTDIPYLGKREDLWCGSLIGHRPRTTWAENIKNTVNMVRRIIGDEEKYMDYLSTQVRYLGEEGSTPGVL

SEQ ID NO: 8 - protein, 3391 aa, Artificial
  DENV/ZIKV 5J7
MNNQRKKTGKPSINMLKRVRNRVSTGPQLAKRFSKGLLNGQGPMKLVMAFIAFLRFLAIPPTAGVLARWGTFKKSGAIKVLKGFKKEISNMLSIINKRKKTSLCLMMILPAALAFHLTSRDGEPRMIVGKNERGKSLLFKTASGINMCTLIAMDLGEMCDDTVTYKCPHITEVEPEDIDCWCNLTSTWVTYGTCNQAGEHRRDKRSVALAPHVGMGLDTRTQTWMSAEGAWRQVEKVETWALRHPGFTILALFLAHYIGTSLTQKVVIFILLMLVTPSMTMRCVGIGNRDFVEGLSGATWVDVVLEHGGCVTTMAKNKPTLDIELQKTTVSNMAEVRSYCYEAKITNITTDSRCPTQGEAVLPEEQDQNYVCKHTYVDRGWGNGCGLFGKGSLVTCAKFQCSKKMTGKSIQPENLKYTVIITVHTGDQHQVGNETQGVTAEITPQASTTEAILPEYGTLGLECSPRTGLDFNDLYLLTMNNKHWLVHKEWFHDIPLPWHAGADTGTPHWNRKELLVTFKNAHAKKQEVVVLGSQEGAMHTALTGATEAEMDGAKGRLSSGHLKCRLKMDKLELKGMSYAMCTNTFVLKKEVSETQHGTILIKVEYKGEDAPCKIPFSTEDGQGKAHNGRLITANPVVTKKEEPVNIEAEPPFGESNIVIGIGDNALKINWYKKGSSIGKMFEATARGARRMAILGDTAWDFGSVGGVLNSLGKMVHQIFGSAYTALFSGVSWVMKIGIGVLLTWIGLNSKNTSMSFSCIAIGIITLYLGAVVQADMGCVINWKGKELKCGSGIFVTNEVHTWTEQYKFQADSPKRLATAIAGAWENGVCGIRSTTRMENLLWKQIANELNYILWENNIKLTVVVGDTIGVLEQGKRTLTPQPMELKYSWKTWGKAKIVTAETQNSSFIIDGPNTPECPSASRAWNVWEVEDYGFGVFTTNIWLKLRDVYTQLCDHRLMSAAVKDERAVHADMGYWIESQKNGSWKLEKASLIEVKTCTWPKSHTLWSNGVLESDMIIPKSLAGPISQHNYRPGYHTQTAGPWHLGKLELDFNYCEGTTVVITENCGTRGPSLRTTTVSGKLIHEWCCRSCTLPPLRYMGEDGCWYGMEIRPISEKEENMVKSLVSAGSGKVDNFTMGVLCLAILFEEVMRGKFGKKHMIAGVLFTFVLLLSGQITWRDMAHTLIMIGSNASDRMGMGVTYLALIATFKIQPFLALGFFLRKLTSRENLLLGVGLAMATTLQLPEDIEQMANGIALGLMALKLITQFETYQLWTALVSLTCSNTILTLTVAWRTATLILAGVSLLPVCQSSSMRKTDWLPMTVAAMGVPPLPLFIFSLKDTLKRRSWPLNEGVMAVGLVSILASSLLRNDVPMAGPLVAGGLLIACYVITGTSADLTVEKAADVTWEEEAEQTGVSHNLMITVDDDGTMRIKDDETENILTVLLKTALLIVSGIFPYSIPATLLVWHTWQKQTQRSGVLWDVPSPPETQKAELEEGVYRIKQQGILGKTQVGVGVQKEGVFHTMWHVTRGAVLTHNGKRLEPNWASVKKDLISYGGGWRLSAQWQKGEEVQVIAVEPGKNPKNFQTMPGTFQTTTGEIGAIALDFKPGTSGSPIINREGKVVGLYGNGVVTKNGGYVSGIAQTNAEPDGPTPELEEEMFKKRNLTIMDLHPGSGKTRKYLPAIVREAIKRRLRTLILAPTRVVAAEMEEALKGLPIRYQTTATKSEHTGREIVDLMCHATFTMRLLSPVRVPNYNLIIMDEAHFTDPASIAARGYISTRVGMGEAAAIFMTATPPGTADAFPQSNAPIQDEERDIPERSWNSGNEWITDFAGKTVWFVPSIKAGNDIANCLRKNGKKVIQLSRKTFDTEYQKTKLNDWDFVVTTDISEMGANFKADRVIDPRRCLKPVILTDGPERVILAGPMPVTAASAAQRRGRVGRNPQKENDQYIFTGQPLNNDEDHAHWTEAKMLLDNINTPEGIIPALFEPEREKSAAIDGEYRLKGESRKTFVELMRRGDLPVWLAHKVASEGIKYTDRKWCFDGQRNNQILEENMDVEIWTKEGEKKKLRPRWLDARTYSDPLALKEFKDFAAGRKSIALDLVTEIGRVPSHLAHRTRNALDNLVMLHTSEHGGRAYRHAVEELPETMETLLLLGLMILLTGGAMLFLISGKGIGKTSIGLICVIASSGMLWMAEIPLQWIASAIVLEFFMMVLLIPEPEKQRTPQDNQLAYVVIGILTLAAIIAANEMGLLETTKRDLGMSKEPGVVSPTSYLDVDLHPASAWTLYAVATTVITPMLRHTIENSTANVSLAAIANQAVVLMGLDKGWPISKMDLGVPLLALGCYSQVNPLTLTAAVLLLITHYAIIGPGLQAKATREAQKRTAAGIMKNPTVDGIMTIDLDPVIYDSKFEKQLGQVMLLVLCAVQLLLMRTSWALCEALTLATGPITTLWEGSPGKFWNTTIAVSMANIFRGSYLAGAGLAFSIMKSVGTGKRGTGSQGETLGEKWKKKLNQLSRKEFDLYKKSGITEVDRTEAKEGLKRGEITHHAVSRGSAKLQWFVERNMVIPEGRVIDLGCGRGGWSYYCAGLKKVTEVRGYTKGGPGHEEPVPMSTYGWNIVKLMSGKDVFYLPPEKCDTLLCDIGESSPSPTVEESRTIRVLKMVEPWLKNNQFCIKVLNPYMPTVIEHLERLQRKHGGMLVRNPLSRNSTHEMYWISNGTGNIVSSVNMVSRLLLNRFTMTHRRPTIEKDVDLGAGTRHVNAEPETPNMDVIGERIKRIKEEHNSTWHYDDENPYKTWAYHGSYEVKATGSASSMINGVVKLLTKPWDVVPMVTQMAMTDTTPFGQQRVFKEKVDTRTPRPMPGTRKVMGITAEWLWRTLGRNKRPRLCTREEFTKKVRTNAAMGAVFTEENQWDSAKAAVEDEEFWKLVDRERELHKLGKCGSCVYNMMGKREKKLGEFGKAKGSRAIWYMWLGARYLEFEALGFLNEDHWFSRDNSYSGVEGEGLHKLGYILRDISKIPGGAMYADDTAGWDTRITEDDLHNEEKITQQMDPEHRQLANAIFKLTYQNKVVKVQRPTPTGTVMDIISRKDQRGSGQVGTYGLNTFTNMEVQLVRQMEGEGVLSKADLENPHLPEKKITQWLETKGVERLKRMAISGDDCVVKPIDDRFANALLALNDMGKVRKDIPQWQPSKGWHDWQQVPFCSHHFHELIMKDGRKLVVPCRPQDELIGRARISQGAGWSLRETACLGKAYAQMWSLMYFHRRDLRLASNAICSAVPVHWVPTSRTTWSIHAHHQWMTTEDMLTVWNRVWIEDNPWMEDKTPVTTWENVPYLGKREDQWCGSLIGLTSRATWAQNIPTAIQQVRSLIGNEEFLDYMPSMKRFRKEEESEGAIW

SEQ ID NO: 9 - protein, 3390 aa, Artificial
  DENV/ZIKV EDIII
MNQRKKVVRPPFNMLKRERNRVSTPQGLVKRFSTGLFSGKGPLRMVLAFITFLRVLSIPPTAGILKRWGQLKKNKAIKILIGFRKEIGRMLNILNGRKRSTITLLCLIPTVMAFHLSTRDGEPLMIVAKHERGRPLLFKTTEGINKCTLIAMDLGEMCEDTVTYKCPLLVNTEPEDIDCWCNLTSTWVMYGTCTQSGERRREKRSVALTPHSGMGLETRAETWMSSEGAWKHAQRVESWILRNPGFALLAGFMAYMIGQTGIQRTVFFVLMMLVAPSYGMRCVGVGNRDFVEGVSGGAWVDLVLEHGGCVTTMAQGKPTLDFELTKTTAKEVALLRTYCIEASISNITTATRCPTQGEPYLKEEQDQQYICRRDVVDRGWGNGCGLFGKGGVVTCAKFSCSGKITGNLVQIENLEYTVVVTVHNGDTHAVGNDTSNHGVTATITPRSPSVEVKLPDYGELTLDCEPRSGIDFNEMILMKMKKKTWLVHKQWFLDLPLPWTAGADTSEVHWNYKERMVTFKVPHAKRQDVTVLGSQEGAMHSALAGATEVDSGDGNHMFAGHLKCKVRMEKLRIKGVSYSLCTAAFTFTKIPAETLHGTVTVEVQYAGTDGPCKVPAQMAVDMQTLTPVGRLITANPVITESTENSKMMLELDPPFGDSYIVIGVGEKKITHHWHRSGSTIGKMFESTYRGAKRMAILGETAWDFGSVGGLFTSLGKAVHQVFGSVYTTMFGGVSWMIRILIGFLVLWIGTNSRNTSMAMTCIAVGGITLFLGFTVQADMGCVVSWSGRELKCGSGIFVVDNVHTWTEQYKFQPESPARLASAILNAHKDGVCGIRSTTRLENVMWKQITNELNYVLWEGGHDLTVVAGDVKGVLTKGKRALTPPVSDLKYSWKTWGKAKIFTPEARNSTFLIDGPDTSECPNERRAWNSLEVEDYGFGMFTTNIWMKFREGSSEVCDHRLMSAAIKDQKAVHADMGYWIESSKNQTWQIEKASLIEVKTCLWPKTHTLWSNGVLESQMLIPKSYAGPFSQHNYRQGYATQTVGPWHLGKLEIDFGECPGTTVTIQEDCDHRGPSLRTTTASGKLVTQWCCRSCTMPPLRFLGEDGCWYGMEIRPLSEKEENMVKSQVTAGQGTSETFSMGLLCLTLFVEECLRRRVTRKHMILVVVITLCAIILGGLTWMDLLRALIMLGDTMSGRIGGQIHLAIMAVFKMSPGYVLGVFLRKLTSRETALMVIGMAMTTVLSIPHDLMELIDGISLGLILLKIVTQFDNTQVGTLALSLTFIRSTMPLVMAWRTIMAVLFVVTLIPLCRTSCLQKQSHWVEITALILGAQALPVYLMTLMKGASRRSWPLNEGIMAVGLVSLLGSALLKNDVPLAGPMVAGGLLLAAYVMSGSSADLSLEKAANVQWDEMADITGSSPIIEVKQDEDGSFSIRDVEETNMITLLVKLALITVSGLYPLAIPITMTLWYMWQVKTQRSGALWDVPSPAATQKAALSEGVYRIMQRGLFGKTQVGVGIHMEGVFHTMWHVTRGSVICHETGRLEPSWADVRNDMISYGGGWRLGDKWDKEEDVQVLAIEPGKNPKHVQTKPGLFKTLTGEIGAVTLDFKPGTSGSPIINRKGKVIGLYGNGVVTKSGDYVSAITQAERIGEPDYEVDEDIFRKKRLTIMDLHPGAGKTKRILPSIVREALKRRLRTLILAPTRVVAAEMEEALRGLPIRYQTPAVKSEHTGREIVDLMCHATFTTRLLSSTRVPNYNLIVMDEAHFTDPSSVAARGYISTRVEMGEAAAIFMTATPPGATDPFPQSNSPIEDIEREIPERSWNTGFDWITDYQGKTVWFVPSIKAGNDIANCLRKSGKKVIQLSRKTFGTEYPKTKLTDWDFVVTTDISEMGANFRAGRVIDPRRCLKPVILTDGPERVILAGPIPVTPASAAQRRGRVGRNPAQEDDQYVFSGDPLKNDEDHAHWTEAKMLLDNIYTPEGIIPTLFGPEREKTQAIDGEFRLRGEQRKTFVELMRRGDLPVWLSYKVASAGISYKDREWCFTGERNNQILEENMEVEIWTREGEKKKLRPRWLDARVYADPMALKDFKEFASGRKSITLDILTEIASLPAYLSSRAKLALDNIVMLHTTERGGRAYQHALNELPESLETLMLVALLGAMTAGIFLFFMQGKGIGKLSMGLITIAVASGLLWIAEIQPQWIAASIILEFFLMVLLIPEPEKQRTPQDNQLIYVILTVLTIIGLIAANEMGLIEKTKTDFGFYQVKTETTILDVDLRPASAWTLYAVATTVLTPMLRHTIENTSANLSLAAIANQAAVLMGLGKGWPLHRMDLGVPLLAMGCYSQVNPTTLTASLVMLFVHYAIIGPGLQAKATREAQKRTAAGIMKNPTVDGITVIDLEPISYDPKFEKQLGQVMLLVLCAGQLLLMRTTWAFCEVLTLATGPILTLWEGNPGRFWNTTIAVSTANIFRGSYLAGAGLAFSLIKNAQTPRRGTGTTGETLGEKWKRQLNSLDRKEFEEYKRSGILEVDRTEAKSALKDGSKIKHAVSRGSSKIRWIVERGMVKPKGKVVDLGCGRGGWSYYMATLKNVTEVKGYTKGGPGHEEPIPMATYGWNLVKLHSGVDVFYKPTEQVDTLLCDIGESSSNPTIEEGRTLRVLKMVEPWLSSKPEFCIKVLNPYMPTVIEELEKLQRKHGGNLVRCPLSRNSTHEMYWVSGASGNIVSSVNTTSKMLLNRFTTRHRKPTYEKDVDLGAGTRSVSTETEKPDMTIIGRRLQRLQEEHKETWHYDQENPYRTWAYHGSYEAPSTGSASSMVNGVVKLLTKPWDVIPMVTQLAMTDTTPFGQQRVFKEKVDTRTPQPKPGTRMVMTTTANWLWALLGKKKNPRLCTREEFISKVRSNAAIGAVFQEEQGWTSASEAVNDSRFWELVDKERALHQEGKCESCVYNMMGKREKKLGEFGRAKGSRAIWYMWLGARFLEFEALGFLNEDHWFGRENSWSGVEGEGLHRLGYILEEIDKKDGDLMYADDTAGWDTRITEDDLQNEELITEQMAPHHKILAKAIFKLTYQNKVVKVLRPTPRGAVMDIISRKDQRGSGQVGTYGLNTFTNMEVQLIRQMEAEGVITQDDMQNPKGLKERVEKWLRECGVDRLKRMAISGDDCVVKPLDERFGTSLLFLNDMGKVRKDIPQWEPSKGWKNWQEVPFCSHHFHKIFMKDGRSLVVPCRNQDELIGRARISQGAGWSLRETACLGKAYAQMWSLMYFHRRDLRLASMAICSAVPTEWFPTSRTTWSIHAHHQWMTTEDMLKVWNRVWIEDNPNMTDKTPVHSWEDIPYLGKREDLWCGSLIGLSSRATWAKNIHTAITQVRNLIGKEEYVDYMPVMKRYSAPSESEGVL

SEQ ID NO: 10 - protein, 3388 aa, Artificial
  DENV/ZIKV Z20
MNQRKKVVRPPFNMLKRERNRVSTPQGLVKRFSTGLFSGKGPLRMVLAFITFLRVLSIPPTAGILKRWGQLKKNKAIKILIGFRKEIGRMLNILNGRKRSTITLLCLIPTVMAFHLSTRDGEPLMIVAKHERGRPLLFKTTEGINKCTLIAMDLGEMCEDTVTYKCPLLVNTEPEDIDCWCNLTSTWVMYGTCTQSGERRREKRSVALTPHSGMGLETRAETWMSSEGAWKHAQRVESWILRNPGFALLAGFMAYMIGQTGIQRTVFFVLMMLVAPSYGMRCVGVGNRDFVEGVSGGAWVDLVLEHGGCVTTMAQGKPTLDFELTKTTAKEVALLRTYCIEASISDMATATRCPTQGEPYLKKEQDQQYICRRDVVDRGWGNGCGLFGKGGVVTCAKFACSGKITGNLVQIENLEYTVVVTVHNGDTHAVGNDTSNHGVTATITPRSPSVEVKLPDYGELTLDCEPRSGIDFNEMILMKMKNKTWLVHKQWFLDLPLPWTAGADTGTVHWNYKERMVTFKVPHAKRQDVTVLGSQEGAMHSALAGATEVEMDGDGNHMFAGHLKCKVRMEKLRIKGMSYTMCSGKFSIDKEMAETQHGTTVVKVKYEGAGAPCKVPIEIRDVNKEKVVGRVISSTPLAENTNSVTNIELEPPFGDSYIVIGVGNSALTLHWFRKGSSIGKMFESTYRGAKRMAILGETAWDFGSVGGLFTSLGKAVHQVFGSVYTTMFGGVSWMIRILIGFLVLWIGTNSRNTSMAMTCIAVGGITLFLGFTVQADMGCVVSWSGRELKCGSGIFVVDNVHTWTEQYKFQPESPARLASAILNAHKDGVCGIRSTTRLENVMWKQITNELNYVLWEGGHDLTVVAGDVKGVLTKGKRALTPPVSDLKYSWKTWGKAKIFTPEARNSTFLIDGPDTSECPNERRAWNSLEVEDYGFGMFTTNIWMKFREGSSEVCDHRLMSAAIKDQKAVHADMGYWIESSKNQTWQIEKASLIEVKTCLWPKTHTLWSNGVLESQMLIPKSYAGPFSQHNYRQGYATQTVGPWHLGKLEIDFGECPGTTVTIQEDCDHRGPSLRTTTASGKLVTQWCCRSCTMPPLRFLGEDGCWYGMEIRPLSEKEENMVKSQVTAGQGTSETFSMGLLCLTLFVEECLRRRVTRKHMILVVVITLCAIILGGLTWMDLLRALIMLGDTMSGRIGGQIHLAIMAVFKMSPGYVLGVFLRKLTSRETALMVIGMAMTTVLSIPHDLMELIDGISLGLILLKIVTQFDNTQVGTLALSLTFIRSTMPLVMAWRTIMAVLFVVTLIPLCRTSCLQKQSHWVEITALILGAQALPVYLMTLMKGASRRSWPLNEGIMAVGLVSLLGSALLKNDVPLAGPMVAGGLLLAAYVMSGSSADLSLEKAANVQWDEMADITGSSPIIEVKQDEDGSFSIRDVEETNMITLLVKLALITVSGLYPLAIPITMTLWYMWQVKTQRSGALWDVPSPAATQKAALSEGVYRIMQRGLFGKTQVGVGIHMEGVFHTMWHVTRGSVICHETGRLEPSWADVRNDMISYGGGWRLGDKWDKEEDVQVLAIEPGKNPKHVQTKPGLFKTLTGEIGAVTLDFKPGTSGSPIINRKGKVIGLYGNGVVTKSGDYVSAITQAERIGEPDYEVDEDIFRKKRLTIMDLHPGAGKTKRILPSIVREALKRRLRTLILAPTRVVAAEMEEALRGLPIRYQTPAVKSEHTGREIVDLMCHATFTTRLLSSTRVPNYNLIVMDEAHFTDPSSVAARGYISTRVEMGEAAAIFMTATPPGATDPFPQSNSPIEDIEREIPERSWNTGFDWITDYQGKTVWFVPSIKAGNDIANCLRKSGKKVIQLSRKTFGTEYPKTKLTDWDFVVTTDISEMGANFRAGRVIDPRRCLKPVILTDGPERVILAGPIPVTPASAAQRRGRVGRNPAQEDDQYVFSGDPLKNDEDHAHWTEAKMLLDNIYTPEGIIPTLFGPEREKTQAIDGEFRLRGEQRKTFVELMRRGDLPVWLSYKVASAGISYKDREWCFTGERNNQILEENMEVEIWTREGEKKKLRPRWLDARVYADPMALKDFKEFASGRKSITLDILTEIASLPAYLSSRAKLALDNIVMLHTTERGGRAYQHALNELPESLETLMLVALLGAMTAGIFLFFMQGKGIGKLSMGLITIAVASGLLWIAEIQPQWIAASIILEFFLMVLLIPEPEKQRTPQDNQLIYVILTVLTIIGLIAANEMGLIEKTKTDFGFYQVKTETTILDVDLRPASAWTLYAVATTVLTPMLRHTIENTSANLSLAAIANQAAVLMGLGKGWPLHRMDLGVPLLAMGCYSQVNPTTLTASLVMLFVHYAIIGPGLQAKATREAQKRTAAGIMKNPTVDGITVIDLEPISYDPKFEKQLGQVMLLVLCAGQLLLMRTTWAFCEVLTLATGPILTLWEGNPGRFWNTTIAVSTANIFRGSYLAGAGLAFSLIKNAQTPRRGTGTTGETLGEKWKRQLNSLDRKEFEEYKRSGILEVDRTEAKSALKDGSKIKHAVSRGSSKIRWIVERGMVKPKGKVVDLGCGRGGWSYYMATLKNVTEVKGYTKGGPGHEEPIPMATYGWNLVKLHSGVDVFYKPTEQVDTLLCDIGESSSNPTIEEGRTLRVLKMVEPWLSSKPEFCIKVLNPYMPTVIEELEKLQRKHGGNLVRCPLSRNSTHEMYWVSGASGNIVSSVNTTSKMLLNRFTTRHRKPTYEKDVDLGAGTRSVSTETEKPDMTIIGRRLQRLQEEHKETWHYDQENPYRTWAYHGSYEAPSTGSASSMVNGVVKLLTKPWDVIPMVTQLAMTDTTPFGQQRVFKEKVDTRTPQPKPGTRMVMTTTANWLWALLGKKKNPRLCTREEFISKVRSNAAIGAVFQEEQGWTSASEAVNDSRFWELVDKERALHQEGKCESCVYNMMGKREKKLGEFGRAKGSRAIWYMWLGARFLEFEALGFLNEDHWFGRENSWSGVEGEGLHRLGYILEEIDKKDGDLMYADDTAGWDTRITEDDLQNEELITEQMAPHHKILAKAIFKLTYQNKVVKVLRPTPRGAVMDIISRKDQRGSGQVGTYGLNTFTNMEVQLIRQMEAEGVITQDDMQNPKGLKERVEKWLRECGVDRLKRMAISGDDCVVKPLDERFGTSLLFLNDMGKVRKDIPQWEPSKGWKNWQEVPFCSHHFHKIFMKDGRSLVVPCRNQDELIGRARISQGAGWSLRETACLGKAYAQMWSLMYFHRRDLRLASMAICSAVPTEWFPTSRTTWSIHAHHQWMTTEDMLKVWNRVWIEDNPNMTDKTPVHSWEDIPYLGKREDLWCGSLIGLSSRATWAKNIHTAITQVRNLIGKEEYVDYMPVMKRYSAPSESEGVL

SEQ ID NO: 11 - protein, 3388 aa, Artificial
  DENV/ZIKV Z3L1
MNQRKKVVRPPFNMLKRERNRVSTPQGLVKRFSTGLFSGKGPLRMVLAFITFLRVLSIPPTAGILKRWGQLKKNKAIKILIGFRKEIGRMLNILNGRKRSTITLLCLIPTVMAFHLSTRDGEPLMIVAKHERGRPLLFKTTEGINKCTLIAMDLGEMCEDTVTYKCPLLVNTEPEDIDCWCNLTSTWVMYGTCTQSGERRREKRSVALTPHSGMGLETRAETWMSSEGAWKHAQRVESWILRNPGFALLAGFMAYMIGQTGIQRTVFFVLMMLVAPSYGMRCVGVGNRDFVEGVSGGAWVDLVLEHGGCVTTMAQGKPTLDFELVTTTAKNVALLRTYCIEASISNITTATRCPTQGEPYLKEEQDQQYICRRDVVDRGWGNGCGLFGKGGVVTCAKFSCSGKITGNLVQIENLEYRVMVTVHNGDTHATGHETSNHGVKAEITPRSPSVEVKLPDYGELTLDCEPRSGIDFNEMILMKMKNKTWLVHKQWFLDLPLPWTAGADTSEVHWNYKERMVTFKVPHAKRQDVTVLGSQEGAMHSALAGATEVEMDGAKNRMFAGHLKCKVRMEKLRIKGMSYTMCSGKFSIDKEMAETQHGTTVVKVKYEGAGAPCKVPIEIRDVNKEKVVGRVISSTPLAENTNSVTNIELEPPFGDSYIVIGVGNSALTLHWFRKGSSIGKMFESTYRGAKRMAILGETAWDFGSVGGLFTSLGKAVHQVFGSVYTTMFGGVSWMIRILIGFLVLWIGTNSRNTSMAMTCIAVGGITLFLGFTVQADMGCVVSWSGRELKCGSGIFVVDNVHTWTEQYKFQPESPARLASAILNAHKDGVCGIRSTTRLENVMWKQITNELNYVLWEGGHDLTVVAGDVKGVLTKGKRALTPPVSDLKYSWKTWGKAKIFTPEARNSTFLIDGPDTSECPNERRAWNSLEVEDYGFGMFTTNIWMKFREGSSEVCDHRLMSAAIKDQKAVHADMGYWIESSKNQTWQIEKASLIEVKTCLWPKTHTLWSNGVLESQMLIPKSYAGPFSQHNYRQGYATQTVGPWHLGKLEIDFGECPGTTVTIQEDCDHRGPSLRTTTASGKLVTQWCCRSCTMPPLRFLGEDGCWYGMEIRPLSEKEENMVKSQVTAGQGTSETFSMGLLCLTLFVEECLRRRVTRKHMILVVVITLCAIILGGLTWMDLLRALIMLGDTMSGRIGGQIHLAIMAVFKMSPGYVLGVFLRKLTSRETALMVIGMAMTTVLSIPHDLMELIDGISLGLILLKIVTQFDNTQVGTLALSLTFIRSTMPLVMAWRTIMAVLFVVTLIPLCRTSCLQKQSHWVEITALILGAQALPVYLMTLMKGASRRSWPLNEGIMAVGLVSLLGSALLKNDVPLAGPMVAGGLLLAAYVMSGSSADLSLEKAANVQWDEMADITGSSPIIEVKQDEDGSFSIRDVEETNMITLLVKLALITVSGLYPLAIPITMTLWYMWQVKTQRSGALWDVPSPAATQKAALSEGVYRIMQRGLFGKTQVGVGIHMEGVFHTMWHVTRGSVICHETGRLEPSWADVRNDMISYGGGWRLGDKWDKEEDVQVLAIEPGKNPKHVQTKPGLFKTLTGEIGAVTLDFKPGTSGSPIINRKGKVIGLYGNGVVTKSGDYVSAITQAERIGEPDYEVDEDIFRKKRLTIMDLHPGAGKTKRILPSIVREALKRRLRTLILAPTRVVAAEMEEALRGLPIRYQTPAVKSEHTGREIVDLMCHATFTTRLLSSTRVPNYNLIVMDEAHFTDPSSVAARGYISTRVEMGEAAAIFMTATPPGATDPFPQSNSPIEDIEREIPERSWNTGFDWITDYQGKTVWFVPSIKAGNDIANCLRKSGKKVIQLSRKTFGTEYPKTKLTDWDFVVTTDISEMGANFRAGRVIDPRRCLKPVILTDGPERVILAGPIPVTPASAAQRRGRVGRNPAQEDDQYVFSGDPLKNDEDHAHWTEAKMLLDNIYTPEGIIPTLFGPEREKTQAIDGEFRLRGEQRKTFVELMRRGDLPVWLSYKVASAGISYKDREWCFTGERNNQILEENMEVEIWTREGEKKKLRPRWLDARVYADPMALKDFKEFASGRKSITLDILTEIASLPAYLSSRAKLALDNIVMLHTTERGGRAYQHALNELPESLETLMLVALLGAMTAGIFLFFMQGKGIGKLSMGLITIAVASGLLWIAEIQPQWIAASIILEFFLMVLLIPEPEKQRTPQDNQLIYVILTVLTIIGLIAANEMGLIEKTKTDFGFYQVKTETTILDVDLRPASAWTLYAVATTVLTPMLRHTIENTSANLSLAAIANQAAVLMGLGKGWPLHRMDLGVPLLAMGCYSQVNPTTLTASLVMLFVHYAIIGPGLQAKATREAQKRTAAGIMKNPTVDGITVIDLEPISYDPKFEKQLGQVMLLVLCAGQLLLMRTTWAFCEVLTLATGPILTLWEGNPGRFWNTTIAVSTANIFRGSYLAGAGLAFSLIKNAQTPRRGTGTTGETLGEKWKRQLNSLDRKEFEEYKRSGILEVDRTEAKSALKDGSKIKHAVSRGSSKIRWIVERGMVKPKGKVVDLGCGRGGWSYYMATLKNVTEVKGYTKGGPGHEEPIPMATYGWNLVKLHSGVDVFYKPTEQVDTLLCDIGESSSNPTIEEGRTLRVLKMVEPWLSSKPEFCIKVLNPYMPTVIEELEKLQRKHGGNLVRCPLSRNSTHEMYWVSGASGNIVSSVNTTSKMLLNRFTTRHRKPTYEKDVDLGAGTRSVSTETEKPDMTIIGRRLQRLQEEHKETWHYDQENPYRTWAYHGSYEAPSTGSASSMVNGVVKLLTKPWDVIPMVTQLAMTDTTPFGQQRVFKEKVDTRTPQPKPGTRMVMTTTANWLWALLGKKKNPRLCTREEFISKVRSNAAIGAVFQEEQGWTSASEAVNDSRFWELVDKERALHQEGKCESCVYNMMGKREKKLGEFGRAKGSRAIWYMWLGARFLEFEALGFLNEDHWFGRENSWSGVEGEGLHRLGYILEEIDKKDGDLMYADDTAGWDTRITEDDLQNEELITEQMAPHHKILAKAIFKLTYQNKVVKVLRPTPRGAVMDIISRKDQRGSGQVGTYGLNTFTNMEVQLIRQMEAEGVITQDDMQNPKGLKERVEKWLRECGVDRLKRMAISGDDCVVKPLDERFGTSLLFLNDMGKVRKDIPQWEPSKGWKNWQEVPFCSHHFHKIFMKDGRSLVVPCRNQDELIGRARISQGAGWSLRETACLGKAYAQMWSLMYFHRRDLRLASMAICSAVPTEWFPTSRTTWSIHAHHQWMTTEDMLKVWNRVWIEDNPNMTDKTPVHSWEDIPYLGKREDLWCGSLIGLSSRATWAKNIHTAITQVRNLIGKEEYVDYMPVMKRYSAPSESEGVL

SEQ ID NO: 12 - protein, 3388 aa, Artificial
  DENV/ZIKV Z20/Z3L1
MNQRKKVVRPPFNMLKRERNRVSTPQGLVKRFSTGLFSGKGPLRMVLAFITFLRVLSIPPTAGILKRWGQLKKNKAIKILIGFRKEIGRMLNILNGRKRSTITLLCLIPTVMAFHLSTRDGEPLMIVAKHERGRPLLFKTTEGINKCTLIAMDLGEMCEDTVTYKCPLLVNTEPEDIDCWCNLTSTWVMYGTCTQSGERRREKRSVALTPHSGMGLETRAETWMSSEGAWKHAQRVESWILRNPGFALLAGFMAYMIGQTGIQRTVFFVLMMLVAPSYGMRCVGVGNRDFVEGVSGGAWVDLVLEHGGCVTTMAQGKPTLDFELVTTTAKNVALLRTYCIEASISDMATATRCPTQGEPYLKKEQDQQYICRRDVVDRGWGNGCGLFGKGGVVTCAKFACSGKITGNLVQIENLEYRVMVTVHNGDTHATGHETSNHGVKAEITPRSPSVEVKLPDYGELTLDCEPRSGIDFNEMILMKMKNKTWLVHKQWFLDLPLPWTAGADTGTVHWNYKERMVTFKVPHAKRQDVTVLGSQEGAMHSALAGATEVEMDGAKNRMFAGHLKCKVRMEKLRIKGMSYTMCSGKFSIDKEMAETQHGTTVVKVKYEGAGAPCKVPIEIRDVNKEKVVGRVISSTPLAENTNSVTNIELEPPFGDSYIVIGVGNSALTLHWFRKGSSIGKMFESTYRGAKRMAILGETAWDFGSVGGLFTSLGKAVHQVFGSVYTTMFGGVSWMIRILIGFLVLWIGTNSRNTSMAMTCIAVGGITLFLGFTVQADMGCVVSWSGRELKCGSGIFVVDNVHTWTEQYKFQPESPARLASAILNAHKDGVCGIRSTTRLENVMWKQITNELNYVLWEGGHDLTVVAGDVKGVLTKGKRALTPPVSDLKYSWKTWGKAKIFTPEARNSTFLIDGPDTSECPNERRAWNSLEVEDYGFGMFTTNIWMKFREGSSEVCDHRLMSAAIKDQKAVHADMGYWIESSKNQTWQIEKASLIEVKTCLWPKTHTLWSNGVLESQMLIPKSYAGPFSQHNYRQGYATQTVGPWHLGKLEIDFGECPGTTVTIQEDCDHRGPSLRTTTASGKLVTQWCCRSCTMPPLRFLGEDGCWYGMEIRPLSEKEENMVKSQVTAGQGTSETFSMGLLCLTLFVEECLRRRVTRKHMILVVVITLCAIILGGLTWMDLLRALIMLGDTMSGRIGGQIHLAIMAVFKMSPGYVLGVFLRKLTSRETALMVIGMAMTTVLSIPHDLMELIDGISLGLILLKIVTQFDNTQVGTLALSLTFIRSTMPLVMAWRTIMAVLFVVTLIPLCRTSCLQKQSHWVEITALILGAQALPVYLMTLMKGASRRSWPLNEGIMAVGLVSLLGSALLKNDVPLAGPMVAGGLLLAAYVMSGSSADLSLEKAANVQWDEMADITGSSPIIEVKQDEDGSFSIRDVEETNMITLLVKLALITVSGLYPLAIPITMTLWYMWQVKTQRSGALWDVPSPAATQKAALSEGVYRIMQRGLFGKTQVGVGIHMEGVFHTMWHVTRGSVICHETGRLEPSWADVRNDMISYGGGWRLGDKWDKEEDVQVLAIEPGKNPKHVQTKPGLFKTLTGEIGAVTLDFKPGTSGSPIINRKGKVIGLYGNGVVTKSGDYVSAITQAERIGEPDYEVDEDIFRKKRLTIMDLHPGAGKTKRILPSIVREALKRRLRTLILAPTRVVAAEMEEALRGLPIRYQTPAVKSEHTGREIVDLMCHATFTTRLLSSTRVPNYNLIVMDEAHFTDPSSVAARGYISTRVEMGEAAAIFMTATPPGATDPFPQSNSPIEDIEREIPERSWNTGFDWITDYQGKTVWFVPSIKAGNDIANCLRKSGKKVIQLSRKTFGTEYPKTKLTDWDFVVTTDISEMGANFRAGRVIDPRRCLKPVILTDGPERVILAGPIPVTPASAAQRRGRVGRNPAQEDDQYVFSGDPLKNDEDHAHWTEAKMLLDNIYTPEGIIPTLFGPEREKTQAIDGEFRLRGEQRKTFVELMRRGDLPVWLSYKVASAGISYKDREWCFTGERNNQILEENMEVEIWTREGEKKKLRPRWLDARVYADPMALKDFKEFASGRKSITLDILTEIASLPAYLSSRAKLALDNIVMLHTTERGGRAYQHALNELPESLETLMLVALLGAMTAGIFLFFMQGKGIGKLSMGLITIAVASGLLWIAEIQPQWIAASIILEFFLMVLLIPEPEKQRTPQDNQLIYVILTVLTIIGLIAANEMGLIEKTKTDFGFYQVKTETTILDVDLRPASAWTLYAVATTVLTPMLRHTIENTSANLSLAAIANQAAVLMGLGKGWPLHRMDLGVPLLAMGCYSQVNPTTLTASLVMLFVHYAIIGPGLQAKATREAQKRTAAGIMKNPTVDGITVIDLEPISYDPKFEKQLGQVMLLVLCAGQLLLMRTTWAFCEVLTLATGPILTLWEGNPGRFWNTTIAVSTANIFRGSYLAGAGLAFSLIKNAQTPRRGTGTTGETLGEKWKRQLNSLDRKEFEEYKRSGILEVDRTEAKSALKDGSKIKHAVSRGSSKIRWIVERGMVKPKGKVVDLGCGRGGWSYYMATLKNVTEVKGYTKGGPGHEEPIPMATYGWNLVKLHSGVDVFYKPTEQVDTLLCDIGESSSNPTIEEGRTLRVLKMVEPWLSSKPEFCIKVLNPYMPTVIEELEKLQRKHGGNLVRCPLSRNSTHEMYWVSGASGNIVSSVNTTSKMLLNRFTTRHRKPTYEKDVDLGAGTRSVSTETEKPDMTIIGRRLQRLQEEHKETWHYDQENPYRTWAYHGSYEAPSTGSASSMVNGVVKLLTKPWDVIPMVTQLAMTDTTPFGQQRVFKEKVDTRTPQPKPGTRMVMTTTANWLWALLGKKKNPRLCTREEFISKVRSNAAIGAVFQEEQGWTSASEAVNDSRFWELVDKERALHQEGKCESCVYNMMGKREKKLGEFGRAKGSRAIWYMWLGARFLEFEALGFLNEDHWFGRENSWSGVEGEGLHRLGYILEEIDKKDGDLMYADDTAGWDTRITEDDLQNEELITEQMAPHHKILAKAIFKLTYQNKVVKVLRPTPRGAVMDIISRKDQRGSGQVGTYGLNTFTNMEVQLIRQMEAEGVITQDDMQNPKGLKERVEKWLRECGVDRLKRMAISGDDCVVKPLDERFGTSLLFLNDMGKVRKDIPQWEPSKGWKNWQEVPFCSHHFHKIFMKDGRSLVVPCRNQDELIGRARISQGAGWSLRETACLGKAYAQMWSLMYFHRRDLRLASMAICSAVPTEWFPTSRTTWSIHAHHQWMTTEDMLKVWNRVWIEDNPNMTDKTPVHSWEDIPYLGKREDLWCGSLIGLSSRATWAKNIHTAITQVRNLIGKEEYVDYMPVMKRYSAPSESEGVL

SEQ ID NO: 13 - protein, 403 aa, Artificial
  ZikV Backbone with DENV1 "5J7" Homologous epitope
IRCIGVSNRDFVEGMSGGTWVDVVLEHGGCVTVMAQDKPTVDIELVTTEVTNPAVLRKLCIEASISDMASDSRCPTQGEAYLDKQSDTQYVCKRTLVDRGWGNGCGLFGKGSLVTCAKFACVTKLEGKIVQYENLEYRIMLSVHGSQHSGMIVNDTGHETDENRAKVEITPNSPRAEATLGGFGSLGLDCEPRTGLDFSEMVLLTMENKSWLVHKQWFLDLPLPWTSGASTSTPTWNNKEALVEFKDAHAKRQTVVVLGSQEGAVHTALAGALEIQTSGTTTIFAGHLKCRLKMDKLRLKGVSYSLCTAAFTFTKIPAETLHGTVTVEVQYAGTDGPCKVPAQMAVDMQTLTPVGRLITANPVITESTENSKMMLELDPPFGDSYIVIGVGEKKITHHWHRSG

SEQ ID NO: 14 - protein, 403 aa, Artificial
  ZikV Backbone with DENV2 "5J7" Homologous epitope
IRCIGVSNRDFVEGMSGGTWVDVVLEHGGCVTVMAQDKPTVDIELVTTEAKQPATLRKYCIEASISDMASDSRCPTQGEAYLDKQSDTQYVCKRTLVDRGWGNGCGLFGKGSLVTCAKFACKKNMEGKVVQPENLEYRIMLSVHGSQHSGMIVNDTGHETDENRAKVEITPNSPRAEATLGGFGSLGLDCEPRTGLDFSEMVLLTMENKAWLVHRQWFLDLPLPWLPGADTQTPNWNNKEALVEFKDAHAKRQTVVVLGSQEGAVHTALAGALEIQMSSGNLLFTGHLKCRLKMDKLRLKGVSYSLCTAAFTFTKIPAETLHGTVTVEVQYAGTDGPCKVPAQMAVDMQTLTPVGRLITANPVITESTENSKMMLELDPPFGDSYIVIGVGEKKITHHWHRSG

SEQ ID NO: 15 - protein, 403 aa, Artificial
  ZikV Backbone with DENV3 5J7 epitope
IRCIGVSNRDFVEGMSGGTWVDVVLEHGGCVTVMAQDKPTVDIELVTTEATQLATLRKLCIEGSISDMASDSRCPTQGEAYLDKQSDTQYVCKRTLVDRGWGNGCGLFGKGSLVTCAKFACLEPIEGKVVQYENLEYRIMLSVHGSQHSGMIVNDTGHETDENRAKVEITPNSPRAEATLGGFGSLGLDCEPRTGLDFSEMIILTMKNKAWMVHRQWFFDLPLPWTSGATTETPTWNNKEALVEFKDAHAKRQTVVVLGSQEGAVHTALAGALEIQNSGGTSIFAGHLKCRLKMDKLRLKGVSYSLCTAAFTFTKIPAETLHGTVTVEVQYAGTDGPCKVPAQMAVDMQTLTPVGRLITANPVITESTENSKMMLELDPPFGDSYIVIGVGEKKITHHWHRSG

SEQ ID NO: 16 - protein, 403 aa, Artificial
  ZikV Backbone with DENV4 "5J7" Homologous epitope
IRCIGVSNRDFVEGMSGGTWVDVVLEHGGCVTVMAQDKPTVDIELVTTTAKEVALLRTYCIEASISDMASDSRCPTQGEAYLDKQSDTQYVCKRTLVDRGWGNGCGLFGKGSLVTCAKFACSGKITGNLVQIENLEYRIMLSVHGSQHSGMIVNDTGHETDENRAKVEITPNSPRAEATLGGFGSLGLDCEPRTGLDFSEMILMKMKKKTWLVHKQWFLDLPLPWTAGADTSEVHWNNKEALVEFKDAHAKRQTVVVLGSQEGAVHTALAGALEVDSGDGNHMFAGHLKCRLKMDKLRLKGVSYSLCTAAFTFTKIPAETLHGTVTVEVQYAGTDGPCKVPAQMAVDMQTLTPVGRLITANPVITESTENSKMMLELDPPFGDSYIVIGVGEKKITHHWHRSG

SEQ ID NO: 17 - protein, 395 aa, Artificial
  DENV1 Backbone with 5J7 Homologous ZikV epitope
MRCVGIGNRDFVEGLSGATWVDVVLEHGSCVTTMAKDKPTLDIELLKTTVSNMAEVRSYCYEAKISNTTTDSRCPTQGEATLVEEQDTNFVCRRTFVDRGWGNGCGLFGKGSLITCAKFKCSKKMTGKSIQPENLKYSVIVTVHTGDQHQVGNETTEHGTTATITPQAPTSEIQLTDYGALTLDCSPRTGLDFNDLYLLTMNNKHWLVHKEWFHDIPLPWHAGADTGTPHWNRQDLLVTFKTAHAKKQEVVVLGSQEGAMHTALTGATEAEMDGAKGRLSSGHLKCRLKMDKLTLKGMSYVMCTGSFKLEKEVAETQHGTVLVQVKYEGTDAPCKIPFSSQDEKGVTQNGRLITANPIVTDKEKPVNIEAEPPFGESYIVVGAGEKALKLSWFKK

SEQ ID NO: 18 - protein, 395 aa, Artificial
  DENV2 Backbone with 5J7 Homologous ZikV epitope
MRCIGISNRDFVEGVSGGSWVDIVLEHGSCVTTMAKNKPTLDFELIKTTVSNMAEVRSYCYEAKLTNTTTESRCPTQGEPSLNEEQDKRFVCKHSMVDRGWGNGCGLFGKGGIVTCAMFTCSKKMTGKSIQPENLEYTIVVTPHSGEEHAVGNDTGKHGKEIKVTPQSSITEAELTGYGTVTMECSPRTGLDFNDLYLLTMNNKHWLVHKEWFHDIPLPWHAGADTGTPHWIQKETLVTFKNPHAKKQDVVVLGSQEGAMHTALTGATEAEMDGAKGRLSSGHLKCRLRMDKLQLKGMSYSMCTGKFKVVKEIAETQHGTIVIRVQYEGDGSPCKIPFEIMDLEKRHVLGRLITVNPIVTEKDSPVNIEAEPPFGDSYIIIGVDPGQLKLNWFKK

SEQ ID NO: 19 - protein, 395 aa, Artificial
  DENV3 Backbone with 5J7 Homologous ZikV epitope
MRCVGIGNRDFVEGLSGATWVDVVLEHGGCVTTMAKNKPTLDIELQKTTVSNMAEVRSYCYEAKITNITTDSRCPTQGEAVLPEEQDQNYVCKHTYVDRGWGNGCGLFGKGSLVTCAKFQCSKKMTGKSIQPENLKYTVIITVHTGDQHQVGNETQGVTAEITPQASTTEAILPEYGTLGLECSPRTGLDFNDLYLLTMNNKHWLVHKEWFHDIPLPWHAGADTGTPHWNRKELLVTFKNAHAKKQEVVVLGSQEGAMHTALTGATEAEMDGAKGRLSSGHLKCRLKMDKLELKGMSYAMCTNTFVLKKEVSETQHGTILIKVEYKGEDAPCKIPFSTEDGQGKAHNGRLITANPVVTKKEEPVNIEARREPPFGESNIVIGIGDNALKINWYKK

SEQ ID NO: 20 - protein, 395 aa, Artificial
  DENV4 Backbone with 5J7 Homologous ZikV epitope
MRCVGVGNRDFVEGVSGGAWVDLVLEHGGCVTTMAQGKPTLDFELTKTTVSNMAEVRSYCYEASISNITTATRCPTQGEPYLKEEQDQQYICRRDVVDRGWGNGCGLFGKGGVVTCAKFSCSKKMTGKSIQPENLEYTVVVTVHNGDTHAVGNDTSNHGVTATITPRSPSVEVKLPDYGELTLDCEPRSGIDFNDLYLLTMNNKHWLVHKEWFHDIPLPWHAGADTGTPHWNYKERMVTFKVPHAKRQDVTVLGSQEGAMHSALAGATEAEMDGAKGRLSSGHLKCKVRMEKLRIKGMSYTMCSGKFSIDKEMAETQHGTTVVKVKYEGAGAPCKVPIEIRDVNKEKVVGRVISSTPLAENTNSVTNIELEPPFGDSYIVIGVGNSALTLHWFRK

SEQ ID NO: 21 - protein, 398 aa, Artificial
  DENV1 Backbone with EDIII from ZikV
MRCVGIGNRDFVEGLSGATWVDVVLEHGSCVTTMAKDKPTLDIELLKTEVTNPAVLRKLCIEAKISNTTTDSRCPTQGEATLVEEQDTNFVCRRTFVDRGWGNGCGLFGKGSLITCAKFKCVTKLEGKIVQYENLKYSVIVTVHTGDQHQVGNETTEHGTTATITPQAPTSEIQLTDYGALTLDCSPRTGLDFNEMVLLTMEKKSWLVHKQWFLDLPLPWTSGASTSQETWNRQDLLVTFKTAHAKKQEVVVLGSQEGAMHTALTGATEIQTSGTTTIFAGHLKCRLKMDKLTLKGMSYSLCTAAFTFTKIPAETLHGTVTVEVQYAGTDGPCKVPAQMAVDMQTLTPVGRLITANPVITESTENSKMMLELDPPFGDSYIVIGVGEKKITHHWHRSG

SEQ ID NO: 22 - protein, 398 aa, Artificial
  DENV2 Backbone with EDIII from ZikV
MRCIGISNRDFVEGVSGGSWVDIVLEHGSCVTTMAKNKPTLDFELIKTEAKQPATLRKYCIEAKLTNTTTESRCPTQGEPSLNEEQDKRFVCKHSMVDRGWGNGCGLFGKGGIVTCAMFTCKKNMEGKVVQPENLEYTIVVTPHSGEEHAVGNDTGKHGKEIKVTPQSSITEAELTGYGTVTMECSPRTGLDFNEMVLLQMENKAWLVHRQWFLDLPLPWLPGADTQGSNWIQKETLVTFKNPHAKKQDVVVLGSQEGAMHTALTGATEIQMSSGNLLFTGHLKCRLRMDKLQLKGMSYSLCTAAFTFTKIPAETLHGTVTVEVQYAGTDGPCKVPAQMAVDMQTLTPVGRLITANPVITESTENSKMMLELDPPFGDSYIVIGVGEKKITHHWHRSG

SEQ ID NO: 23 - protein, 396 aa, Artificial
  DENV3 Backbone with EDIII from ZikV
MRCVGIGNRDFVEGLSGATWVDVVLEHGGCVTTMAKNKPTLDIELQKTEATQLATLRKLCIEGKITNITTDSRCPTQGEAVLPEEQDQNYVCKHTYVDRGWGNGCGLFGKGSLVTCAKFQCLEPIEGKVVQYENLKYTVIITVHTGDQHQVGNETQGVTAEITPQASTTEAILPEYGTLGLECSPRTGLDFNEMILLTMKNKAWMVHRQWFFDLPLPWTSGATTETPTWNRKELLVTFKNAHAKKQEVVVLGSQEGAMHTALTGATEIQNSGGTSIFAGHLKCRLKMDKLELKGMSYSLCTAAFTFTKIPAETLHGTVTVEVQYAGTDGPCKVPAQMAVDMQTLTPVGRLITANPVITESTENSKMMLELDPPFGDSYIVIGVGEKKITHHWHRSG

SEQ ID NO: 24 - protein, 398 aa, Artificial
  DENV4 Backbone with EDIII from ZikV (version 1)
MRCVGVGNRDFVEGVSGGAWVDLVLEHGGCVTTMAQGKPTLDFELTKTTAKEVALLRTYCIEASISNITTATRCPTQGEPYLKEEQDQQYICRRDVVDRGWGNGCGLFGKGGVVTCAKFSCSGKITGNLVQIENLEYTVVVTVHNGDTHAVGNDTSNHGVTATITPRSPSVEVKLPDYGELTLDCEPRSGIDFNEMILMKMKKKTWLVHKQWFLDLPLPWTAGADTSEVHWNYKERMVTFKVPHAKRQDVTVLGSQEGAMHSALAGATEVDSGDGNHMFAGHLKCKVRMEKLRIKGVSYSLCTAAFTFTKIPAETLHGTVTVEVQYAGTDGPCKVPAQMAVDMQTLTPVGRLITANPVITESTENSKMMLELDPPFGDSYIVIGVGEKKITHHWHRSG

SEQ ID NO: 25 - protein, 395 aa, Artificial
  DENV1 Backbone with ZIKV Z20 Epitope
MRCVGIGNRDFVEGLSGATWVDVVLEHGSCVTTMAKDKPTLDIELLKTEVTNPAVLRKLCIEAKISDMATDSRCPTQGEATLVKEQDTNFVCRRTFVDRGWGNGCGLFGKGSLITCAKFACVTKLEGKIVQYENLKYSVIVTVHTGDQHQVGNETTEHGTTATITPQAPTSEIQLTDYGALTLDCSPRTGLDFNEMVLLTMENKSWLVHKQWFLDLPLPWTSGASTGTETWNRQDLLVTFKTAHAKKQEVVVLGSQEGAMHTALTGATEIEMDSGTTTIFAGHLKCRLKMDKLTLKGMSYVMCTGSFKLEKEVAETQHGTVLVQVKYEGTDAPCKIPFSSQDEKGVTQNGRLITANPIVTDKEKPVNIEAEPPFGESYIVVGAGEKALKLSWFKK

SEQ ID NO: 26 - protein, 395 aa, Artificial
  DENV2 Backbone with ZIKV Z20 Epitope
MRCIGISNRDFVEGVSGGSWVDIVLEHGSCVTTMAKNKPTLDFELIKTEAKQPATLRKYCIEAKLTDMATESRCPTQGEPSLNKEQDKRFVCKHSMVDRGWGNGCGLFGKGGIVTCAMFACKKNMEGKVVQPENLEYTIVVTPHSGEEHAVGNDTGKHGKEIKVTPQSSITEAELTGYGTVTMECSPRTGLDFNEMVLLQMENKAWLVHRQWFLDLPLPWLPGADTGTSNWIQKETLVTFKNPHAKKQDVVVLGSQEGAMHTALTGATEIEMDSSGNLLFTGHLKCRLRMDKLQLKGMSYSMCTGKFKVVKEIAETQHGTIVIRVQYEGDGSPCKIPFEIMDLEKRHVLGRLITVNPIVTEKDSPVNIEAEPPFGDSYIIIGVDPGQLKLNWFKK

SEQ ID NO: 27 - protein, 393 aa, Artificial
  DENV3 Backbone with ZIKV Z20 Epitope
MRCVGIGNRDFVEGLSGATWVDVVLEHGGCVTTMAKNKPTLDIELQKTEATQLATLRKLCIEGKITDMATDSRCPTQGEAVLPKEQDQNYVCKHTYVDRGWGNGCGLFGKGSLVTCAKFACLEPIEGKVVQYENLKYTVIITVHTGDQHQVGNETQGVTAEITPQASTTEAILPEYGTLGLECSPRTGLDFNEMILLTMKNKAWMVHRQWFFDLPLPWTSGATTGTPTWNRKELLVTFKNAHAKKQEVVVLGSQEGAMHTALTGATEIEMDSGGTSIFAGHLKCRLKMDKLELKGMSYAMCTNTFVLKKEVSETQHGTILIKVEYKGEDAPCKIPFSTEDGQGKAHNGRLITANPVVTKKEEPVNIEAEPPFGESNIVIGIGDNALKINWYKK

SEQ ID NO: 28 - protein, 395 aa, Artificial
  DENV4 Backbone with ZIKV Z20 Epitope (version 1)
MRCVGVGNRDFVEGVSGGAWVDLVLEHGGCVTTMAQGKPTLDFELTKTTAKEVALLRTYCIEASISDMATATRCPTQGEPYLKKEQDQQYICRRDVVDRGWGNGCGLFGKGGVVTCAKFACSGKITGNLVQIENLEYTVVVTVHNGDTHAVGNDTSNHGVTATITPRSPSVEVKLPDYGELTLDCEPRSGIDFNEMILMKMKNKTWLVHKQWFLDLPLPWTAGADTGTVHWNYKERMVTFKVPHAKRQDVTVLGSQEGAMHSALAGATEVEMDGDGNHMFAGHLKCKVRMEKLRIKGMSYTMCSGKFSIDKEMAETQHGTTVVKVKYEGAGAPCKVPIEIRDVNKEKVVGRVISSTPLAENTNSVTNIELEPPFGDSYIVIGVGNSALTLHWFRK

SEQ ID NO: 29 - protein, 395 aa, Artificial
  DENV1 Backbone with ZIKV Z3L1 Epitope
MRCVGIGNRDFVEGLSGATWVDVVLEHGSCVTTMAKDKPTLDIELVTTEVTNPAVLRKLCIEAKISNTTTDSRCPTQGEATLVEEQDTNFVCRRTFVDRGWGNGCGLFGKGSLITCAKFKCVTKLEGKIVQYENLKYRVMVTVHTGDQHQTGHETTEHGTKAEITPQAPTSEIQLTDYGALTLDCSPRTGLDFNEMVLLTMENKSWLVHKQWFLDLPLPWTSGASTSQETWNRQDLLVTFKTAHAKKQEVVVLGSQEGAMHTALTGATEIEMDSAKTRIFAGHLKCRLKMDKLTLKGMSYVMCTGSFKLEKEVAETQHGTVLVQVKYEGTDAPCKIPFSSQDEKGVTQNGRLITANPIVTDKEKPVNIEAEPPFGESYIVVGAGEKALKLSWFKK

SEQ ID NO: 30 - protein, 395 aa, Artificial
  DENV2 Backbone with ZIKV Z3L1 Epitope
MRCIGISNRDFVEGVSGGSWVDIVLEHGSCVTTMAKNKPTLDFELVTTEAKNPATLRKYCIEAKLTNTTTESRCPTQGEPSLNEEQDKRFVCKHSMVDRGWGNGCGLFGKGGIVTCAMFTCKKNMEGKVVQPENLEYRIMVTPHSGEEHATGHETGKHGKKIEVTPQSSITEAELTGYGTVTMECSPRTGLDFNEMVLLQMENKAWLVHRQWFLDLPLPWLPGADTQGSNWIQKETLVTFKNPHAKKQDVVVLGSQEGAMHTALTGATEIEMDSAKNRLFTGHLKCRLRMDKLQLKGMSYSMCTGKFKVVKEIAETQHGTIVIRVQYEGDGSPCKIPFEIMDLEKRHVLGRLITVNPIVTEKDSPVNIEAEPPFGDSYIIIGVDPGQLKLNWFKK

SEQ ID NO: 31 - protein, 393 aa, Artificial
  DENV3 Backbone with ZIKV Z3L1 Epitope
MRCVGIGNRDFVEGLSGATWVDVVLEHGGCVTTMAKNKPTLDIELVTTEATNLATLRKLCIEGKITNITTDSRCPTQGEAVLPEEQDQNYVCKHTYVDRGWGNGCGLFGKGSLVTCAKFQCLEPIEGKVVQYENLKYRVMITVHTGDQHQTGHETQGVKAEITPQASTTEAILPEYGTLGLECSPRTGLDFNEMILLTMKNKAWMVHRQWFFDLPLPWTSGATTETPTWNRKELLVTFKNAHAKKQEVVVLGSQEGAMHTALTGATEIEMDSAKTRIFAGHLKCRLKMDKLELKGMSYAMCTNTFVLKKEVSETQHGTILIKVEYKGEDAPCKIPFSTEDGQGKAHNGRLITANPVVTKKEEPVNIEAEPPFGESNIVIGIGDNALKINWYKK

SEQ ID NO: 32 - protein, 395 aa, Artificial
  DENV4 Backbone with ZIKV Z3L1 Epitope
MRCVGVGNRDFVEGVSGGAWVDLVLEHGGCVTTMAQGKPTLDFELVTTTAKNVALLRTYCIEASISNITTATRCPTQGEPYLKEEQDQQYICRRDVVDRGWGNGCGLFGKGGVVTCAKFSCSGKITGNLVQIENLEYRVMVTVHNGDTHATGHETSNHGVKAEITPRSPSVEVKLPDYGELTLDCEPRSGIDFNEMILMKMKNKTWLVHKQWFLDLPLPWTAGADTSEVHWNYKERMVTFKVPHAKRQDVTVLGSQEGAMHSALAGATEVEMDGAKNRMFAGHLKCKVRMEKLRIKGMSYTMCSGKFSIDKEMAETQHGTTVVKVKYEGAGAPCKVPIEIRDVNKEKVVGRVISSTPLAENTNSVTNIELEPPFGDSYIVIGVGNSALTLHWFRK

SEQ ID NO: 33 - protein, 395 aa, Artificial
  DENV1 Backbone with ZIKV Z20 and Z3L1 Epitopes
MRCVGIGNRDFVEGLSGATWVDVVLEHGSCVTTMAKDKPTLDIELVTTEVTNPAVLRKLCIEAKISDMATDSRCPTQGEATLVKEQDTNFVCRRTFVDRGWGNGCGLFGKGSLITCAKFACVTKLEGKIVQYENLKYRVMVTVHTGDQHQTGHETTEHGTKAEITPQAPTSEIQLTDYGALTLDCSPRTGLDFNEMVLLTMENKSWLVHKQWFLDLPLPWTSGASTGTETWNRQDLLVTFKTAHAKKQEVVVLGSQEGAMHTALTGATEIEMDSAKTRIFAGHLKCRLKMDKLTLKGMSYVMCTGSFKLEKEVAETQHGTVLVQVKYEGTDAPCKIPFSSQDEKGVTQNGRLITANPIVTDKEKPVNIEAEPPFGESYIVVGAGEKALKLSWFKK

SEQ ID NO: 34 - protein, 395 aa, Artificial
  DENV2 Backbone with ZIKV Z20 and Z3L1 Epitopes
MRCIGISNRDFVEGVSGGSWVDIVLEHGSCVTTMAKNKPTLDFELVTTEAKNPATLRKYCIEAKLTDMATESRCPTQGEPSLNKEQDKRFVCKHSMVDRGWGNGCGLFGKGGIVTCAMFACKKNMEGKVVQPENLEYRIMVTPHSGEEHATGHETGKHGKKIEVTPQSSITEAELTGYGTVTMECSPRTGLDFNEMVLLQMENKAWLVHRQWFLDLPLPWLPGADTGTSNWIQKETLVTFKNPHAKKQDVVVLGSQEGAMHTALTGATEIEMDSAKNRLFTGHLKCRLRMDKLQLKGMSYSMCTGKFKVVKEIAETQHGTIVIRVQYEGDGSPCKIPFEIMDLEKRHVLGRLITVNPIVTEKDSPVNIEAEPPFGDSYIIIGVDPGQLKLNWFKK

SEQ ID NO: 35 - protein, 393 aa, Artificial
  DENV3 Backbone with ZIKV Z20 and Z3L1 Epitopes
MRCVGIGNRDFVEGLSGATWVDVVLEHGGCVTTMAKNKPTLDIELVTTEATNLATLRKLCIEGKITDMATDSRCPTQGEAVLPKEQDQNYVCKHTYVDRGWGNGCGLFGKGSLVTCAKFACLEPIEGKVVQYENLKYRVMITVHTGDQHQTGHETQGVKAEITPQASTTEAILPEYGTLGLECSPRTGLDFNEMILLTMKNKAWMVHRQWFFDLPLPWTSGATTGTPTWNRKELLVTFKNAHAKKQEVVVLGSQEGAMHTALTGATEIEMDSAKTRIFAGHLKCRLKMDKLELKGMSYAMCTNTFVLKKEVSETQHGTILIKVEYKGEDAPCKIPFSTEDGQGKAHNGRLITANPVVTKKEEPVNIEAEPPFGESNIVIGIGDNALKINWYKK

SEQ ID NO: 36 - protein, 395 aa, Artificial
  DENV4 Backbone with ZIKV Z20 and Z3L1 Epitopes
MRCVGVGNRDFVEGVSGGAWVDLVLEHGGCVTTMAQGKPTLDFELVTTTAKNVALLRTYCIEASISDMATATRCPTQGEPYLKKEQDQQYICRRDVVDRGWGNGCGLFGKGGVVTCAKFACSGKITGNLVQIENLEYRVMVTVHNGDTHATGHETSNHGVKAEITPRSPSVEVKLPDYGELTLDCEPRSGIDFNEMILMKMKNKTWLVHKQWFLDLPLPWTAGADTGTVHWNYKERMVTFKVPHAKRQDVTVLGSQEGAMHSALAGATEVEMDGAKNRMFAGHLKCKVRMEKLRIKGMSYTMCSGKFSIDKEMAETQHGTTVVKVKYEGAGAPCKVPIEIRDVNKEKVVGRVISSTPLAENTNSVTNIELEPPFGDSYIVIGVGNSALTLHWFRK

SEQ ID NO: 37 - protein, 404 aa, Artificial
  ZIKV Z20 Epitope Ablation by DENV1
IRCIGVSNRDFVEGMSGGTWVDVVLEHGGCVTVMAQDKPTVDIELVTTTVSNMAEVRSYCYEASISNTTSDSRCPTQGEAYLDEQSDTQYVCKRTLVDRGWGNGCGLFGKGSLVTCAKFKCSKKMTGKSIQPENLEYRIMLSVHGSQHSGMIVNDTGHETDENRAKVEITPNSPRAEATLGGFGSLGLDCEPRTGLDFSDLYYLTMNKKHWLVHKEWFHDIPLPWHAGADTSQPHWNNKEALVEFKDAHAKRQTVVVLGSQEGAVHTALAGALEAQTDGAKGRLSSGHLKCRLKMDKLRLKGVSYSLCTAAFTFTKIPAETLHGTVTVEVQYAGTDGPCKVPAQMAVDMQTLTPVGRLITANPVITESTENSKMMLELDPPFGDSYIVIGVGEKKITHHWHRSG

SEQ ID NO: 38 - protein, 404 aa, Artificial
  ZIKV Z20 Epitope Ablation by DENV2
IRCIGVSNRDFVEGMSGGTWVDVVLEHGGCVTVMAQDKPTVDIELVTTTVSNMAEVRSYCYEASISNTTSDSRCPTQGEAYLDEQSDTQYVCKRTLVDRGWGNGCGLFGKGSLVTCAKFTCSKKMTGKSIQPENLEYRIMLSVHGSQHSGMIVNDTGHETDENRAKVEITPNSPRAEATLGGFGSLGLDCEPRTGLDFSDLYYLTMNNKHWLVHKEWFHDIPLPWHAGADTQGPHWNNKEALVEFKDAHAKRQTVVVLGSQEGAVHTALAGALEAQMDGAKGRLSSGHLKCRLKMDKLRLKGVSYSLCTAAFTFTKIPAETLHGTVTVEVQYAGTDGPCKVPAQMAVDMQTLTPVGRLITANPVITESTENSKMMLELDPPFGDSYIVIGVGEKKITHHWHRSG

SEQ ID NO: 39 - protein, 404 aa, Artificial
  ZIKV Z20 Epitope Ablation by DENV3
IRCIGVSNRDFVEGMSGGTWVDVVLEHGGCVTVMAQDKPTVDIELVTTTVSNMAEVRSYCYEASISNITSDSRCPTQGEAYLDEQSDTQYVCKRTLVDRGWGNGCGLFGKGSLVTCAKFQCSKKMTGKSIQPENLEYRIMLSVHGSQHSGMIVNDTGHETDENRAKVEITPNSPRAEATLGGFGSLGLDCEPRTGLDFSDLYYLTMNNKHWLVHKEWFHDIPLPWHAGADTETPHWNNKEALVEFKDAHAKRQTVVVLGSQEGAVHTALAGALEAQNDGAKGRLSSGHLKCRLKMDKLRLKGVSYSLCTAAFTFTKIPAETLHGTVTVEVQYAGTDGPCKVPAQMAVDMQTLTPVGRLITANPVITESTENSKMMLELDPPFGDSYIVIGVGEKKITHHWHRSG

SEQ ID NO: 40 - protein, 404 aa, Artificial
  ZIKV Z20 Epitope Ablation by DENV4
IRCIGVSNRDFVEGMSGGTWVDVVLEHGGCVTVMAQDKPTVDIELVTTTVSNMAEVRSYCYEASISNITSDSRCPTQGEAYLDEQSDTQYVCKRTLVDRGWGNGCGLFGKGSLVTCAKFSCSKKMTGKSIQPENLEYRIMLSVHGSQHSGMIVNDTGHETDENRAKVEITPNSPRAEATLGGFGSLGLDCEPRTGLDFSDLYYLTMNKKHWLVHKEWFHDIPLPWHAGADTSEPHWNNKEALVEFKDAHAKRQTVVVLGSQEGAVHTALAGALEADSDGAKGRLSSGHLKCRLKMDKLRLKGVSYSLCTAAFTFTKIPAETLHGTVTVEVQYAGTDGPCKVPAQMAVDMQTLTPVGRLITANPVITESTENSKMMLELDPPFGDSYIVIGVGEKKITHHWHRSG

SEQ ID NO: 41 - protein, 404 aa, Artificial
  ZIKV Z3L1 Epitope Ablation by DENV1
IRCIGVSNRDFVEGMSGGTWVDVVLEHGGCVTVMAQDKPTVDIELLKTTVSNMAEVRSYCYEASISDMASDSRCPTQGEAYLDKQSDTQYVCKRTLVDRGWGNGCGLFGKGSLVTCAKFACSKKMTGKSIQPENLEYSIILSVHGSQHSGMIVNDVGNETDENRATVTITPNSPRAEATLGGFGSLGLDCEPRTGLDFSDLYYLTMNKKHWLVHKEWFHDIPLPWHAGADTGTPHWNNKEALVEFKDAHAKRQTVVVLGSQEGAVHTALAGALEAQTDGGTGTLSSGHLKCRLKMDKLRLKGVSYSLCTAAFTFTKIPAETLHGTVTVEVQYAGTDGPCKVPAQMAVDMQTLTPVGRLITANPVITESTENSKMMLELDPPFGDSYIVIGVGEKKITHHWHRSG

SEQ ID NO: 42 - protein, 404 aa, Artificial
  ZIKV Z3L1 Epitope Ablation by DENV2
IRCIGVSNRDFVEGMSGGTWVDVVLEHGGCVTVMAQDKPTVDIELIKTTVSQMAEVRSYCYEASISDMASDSRCPTQGEAYLDKQSDTQYVCKRTLVDRGWGNGCGLFGKGSLVTCAKFACSKKMTGKSIQPENLEYTIVLSVHGSQHSGMIVNDVGNDTDENRAEVKITPNSPRAEATLGGFGSLGLDCEPRTGLDFSDLYYLTMNNKHWLVHKEWFHDIPLPWHAGADTGTPHWNNKEALVEFKDAHAKRQTVVVLGSQEGAVHTALAGALEAQMDGSGGLLSSGHLKCRLKMDKLRLKGVSYSLCTAAFTFTKIPAETLHGTVTVEVQYAGTDGPCKVPAQMAVDMQTLTPVGRLITANPVITESTENSKMMLELDPPFGDSYIVIGVGEKKITHHWHRSG

SEQ ID NO: 43 - protein, 404 aa, Artificial
  ZIKV Z3L1 Epitope Ablation by DENV3
IRCIGVSNRDFVEGMSGGTWVDVVLEHGGCVTVMAQDKPTVDIELQKTTVSQMAEVRSYCYEASISDMASDSRCPTQGEAYLDKQSDTQYVCKRTLVDRGWGNGCGLFGKGSLVTCAKFACSKKMTGKSIQPENLEYTIILSVHGSQHSGMIVNDVGNETDENRATVEITPNSPRAEATLGGFGSLGLDCEPRTGLDFSDLYYLTMNNKHWLVHKEWFHDIPLPWHAGADTGTPHWNNKEALVEFKDAHAKRQTVVVLGSQEGAVHTALAGALEAQNDGGGGSLSSGHLKCRLKMDKLRLKGVSYSLCTAAFTFTKIPAETLHGTVTVEVQYAGTDGPCKVPAQMAVDMQTLTPVGRLITANPVITESTENSKMMLELDPPFGDSYIVIGVGEKKITHHWHRSG

SEQ ID NO: 44 - protein, 404 aa, Artificial
  ZIKV Z3L1 Epitope Ablation by DENV4
IRCIGVSNRDFVEGMSGGTWVDVVLEHGGCVTVMAQDKPTVDIELTKTTVSEMAEVRSYCYEASISDMASDSRCPTQGEAYLDKQSDTQYVCKRTLVDRGWGNGCGLFGKGSLVTCAKFACSKKMTGKSIQPENLEYTIVLSVHGSQHSGMIVNDVGNDTDENRATVTITPNSPRAEATLGGFGSLGLDCEPRTGLDFSDLYYLTMNKKHWLVHKEWFHDIPLPWHAGADTGTPHWNNKEALVEFKDAHAKRQTVVVLGSQEGAVHTALAGALEADSDGDGGHLSSGHLKCRLKMDKLRLKGVSYSLCTAAFTFTKIPAETLHGTVTVEVQYAGTDGPCKVPAQMAVDMQTLTPVGRLITANPVITESTENSKMMLELDPPFGDSYIVIGVGEKKITHHWHRSG

SEQ ID NO: 45 - protein, 404 aa, Artificial
  ZIKV Z20 and Z3L1 Epitope Ablation by DENV1
IRCIGVSNRDFVEGMSGGTWVDVVLEHGGCVTVMAQDKPTVDIELLKTTVSNMAEVRSYCYEASISNTTSDSRCPTQGEAYLDEQSDTQYVCKRTLVDRGWGNGCGLFGKGSLVTCAKFKCSKKMTGKSIQPENLEYSIILSVHGSQHSGMIVNDVGNETDENRATVTITPNSPRAEATLGGFGSLGLDCEPRTGLDFSDLYYLTMNKKHWLVHKEWFHDIPLPWHAGADTSQPHWNNKEALVEFKDAHAKRQTVVVLGSQEGAVHTALAGALEAQTDGGTGTLSSGHLKCRLKMDKLRLKGVSYSLCTAAFTFTKIPAETLHGTVTVEVQYAGTDGPCKVPAQMAVDMQTLTPVGRLITANPVITESTENSKMMLELDPPFGDSYIVIGVGEKKITHHWHRSG

SEQ ID NO: 46 - protein, 404 aa, Artificial
  ZIKV Z20 and Z3L1 Epitope Ablation by DENV2
IRCIGVSNRDFVEGMSGGTWVDVVLEHGGCVTVMAQDKPTVDIELIKTTVSQMAEVRSYCYEASISNTTSDSRCPTQGEAYLDEQSDTQYVCKRTLVDRGWGNGCGLFGKGSLVTCAKFTCSKKMTGKSIQPENLEYTIVLSVHGSQHSGMIVNDVGNDTDENRAEVKITPNSPRAEATLGGFGSLGLDCEPRTGLDFSDLYYLTMNNKHWLVHKEWFHDIPLPWHAGADTQTPHWNNKEALVEFKDAHAKRQTVVVLGSQEGAVHTALAGALEAQMDGSGGLLSSGHLKCRLKMDKLRLKGVSYSLCTAAFTFTKIPAETLHGTVTVEVQYAGTDGPCKVPAQMAVDMQTLTPVGRLITANPVITESTENSKMMLELDPPFGDSYIVIGVGEKKITHHWHRSG

SEQ ID NO: 47 - protein, 404 aa, Artificial
  ZIKV Z20 and Z3L1 Epitope Ablation by DENV3
IRCIGVSNRDFVEGMSGGTWVDVVLEHGGCVTVMAQDKPTVDIELQKTTVSQMAEVRSYCYEASISNITSDSRCPTQGEAYLDEQSDTQYVCKRTLVDRGWGNGCGLFGKGSLVTCAKFQCSKKMTGKSIQPENLEYTIILSVHGSQHSGMIVNDVGNETDENRATVEITPNSPRAEATLGGFGSLGLDCEPRTGLDFSDLYYLTMNNKHWLVHKEWFHDIPLPWHAGADTETPHWNNKEALVEFKDAHAKRQTVVVLGSQEGAVHTALAGALEAQNDGGGGSLSSGHLKCRLKMDKLRLKGVSYSLCTAAFTFTKIPAETLHGTVTVEVQYAGTDGPCKVPAQMAVDMQTLTPVGRLITANPVITESTENSKMMLELDPPFGDSYIVIGVGEKKITHHWHRSG

SEQ ID NO: 48 - protein, 404 aa, Artificial
  ZIKV Z20 and Z3L1 Epitope Ablation by DENV4
IRCIGVSNRDFVEGMSGGTWVDVVLEHGGCVTVMAQDKPTVDIELTKTTVSEMAEVRSYCYEASISNITSDSRCPTQGEAYLDEQSDTQYVCKRTLVDRGWGNGCGLFGKGSLVTCAKFSCSKKMTGKSIQPENLEYTIVLSVHGSQHSGMIVNDVGNDTDENRATVTITPNSPRAEATLGGFGSLGLDCEPRTGLDFSDLYYLTMNKKHWLVHKEWFHDIPLPWHAGADTSEPHWNNKEALVEFKDAHAKRQTVVVLGSQEGAVHTALAGALEADSDGDGGHLSSGHLKCRLKMDKLRLKGVSYSLCTAAFTFTKIPAETLHGTVTVEVQYAGTDGPCKVPAQMAVDMQTLTPVGRLITANPVITESTENSKMMLELDPPFGDSYIVIGVGEKKITHHWHRSG

SEQ ID NO: 49 - protein, 404 aa, Artificial
  ZIKV E Glycoprotein WT
IRCIGVSNRDFVEGMSGGTWVDVVLEHGGCVTVMAQDKPTVDIELVTTTVSNMAEVRSYCYEASISDMASDSRCPTQGEAYLDKQSDTQYVCKRTLVDRGWGNGCGLFGKGSLVTCAKFACSKKMTGKSIQPENLEYRIMLSVHGSQHSGMIVNDTGHETDENRAKVEITPNSPRAEATLGGFGSLGLDCEPRTGLDFSDLYYLTMNNKHWLVHKEWFHDIPLPWHAGADTGTPHWNNKEALVEFKDAHAKRQTVVVLGSQEGAVHTALAGALEAEMDGAKGRLSSGHLKCRLKMDKLRLKGVSYSLCTAAFTFTKIPAETLHGTVTVEVQYAGTDGPCKVPAQMAVDMQTLTPVGRLITANPVITESTENSKMMLELDPPFGDSYIVIGVGEKKITHHWHRSG

SEQ ID NO: 50 - protein, 404 aa, Artificial
  ZIKV EDE1 Null Mutant- Core
IRCIGVSNRDFVEGMSGGTWVDVVLEHGGCVTVMAQDKPTVDIELVTTTVSNMAEVRSYCYEASISDMESRAKCPTQGEAYLDKQSDTQYVCKRTLVDRGWDSGCGLFGKGSLVTCAKFACSKKMTGKSIQPENLEYRIMLSVHGSQHSGMIVNDTGHETDENRAKVEITPNSPRAEATLGGFGSLGLDCEPRTGLDFSDLYYLTMNNKHWLVHKEWFHDIPLPWHAGADTGTPHWNNKEALVEFKDAHATYIPVVVLGSQEGAVHTALAGALEAEMDGAKGRLSSGHLKCRLKMDKLRLKGVSYSLCTAAFTFTKIPAETLHGTVTVEVQYAGTDGPCKVPAQMAVDMQTLTPVGRLITANPVITESTENSKMMLELDPPFGDSYIVIGVGEKKITHHWHRSG

SEQ ID NO: 51 - protein, 404 aa, Artificial
  ZIKV EDE1 Null Mutant- Core and Specific
IHCIGVSNRDFVEGMSGGTWVDVVLEHDGCVTVMAQDKPTVDITVVTTTVSNMAEVRSYCYEASISDMESRAKCPTAGEAYIDKQSDTQYVCKRTLVDRGWDSGCFLFGKGSLVTCAKFACSKKMTGKSIQPENLEYRIMLSVHGSQNSGKIVNDTGHETDEKRAKVEITPNSPRAEATLGGFGSLGLDCEPRTGLDFSDLYYLTMNNKHWLVHKEWFHDIPLPWHAGADTGTPHWNNKEALVEFKDAHATYIPVVVLGSQEGAVHTALAGALEAKMDGAKGRLSSGHLKCRLKMDKLRLKGVSYSLCTAAFTFTSGPAETLHGTVTVLVGYAGTDGPCKVPAQMAVDMQTLTPVGRLITANPVITESTENSKMMLELDPPFGDSYIVIGVGEKKITHHWHRSG

SEQ ID NO: 52 - protein, 404 aa, Artificial
  ZIKV EDE1 Null Mutant- Specific
IHCIGVSNRDFVEGMSGGTWVDVVLEHDGCVTVMAQDKPTVDITVVTTTVSNMAEVRSYCYEASISDMASDSRCPTAGEAYIDKQSDTQYVCKRTLVDRGWGNGCFLFGKGSLVTCAKFACSKKMTGKSIQPENLEYRIMLSVHGSQNSGKIVNDTGHETDEKRAKVEITPNSPRAEATLGGFGSLGLDCEPRTGLDFSDLYYLTMNNKHWLVHKEWFHDIPLPWHAGADTGTPHWNNKEALVEFKDAHAKRQTVVVLGSQEGAVHTALAGALEAKMDGAKGRLSSGHLKCRLKMDKLRLKGVSYSLCTAAFTFTSGPAETLHGTVTVLVGYAGTDGPCKVPAQMAVDMQTLTPVGRLITANPVITESTENSKMMLELDPPFGDSYIVIGVGEKKITHHWHRSG

SEQ ID NO: 53 - protein, 394 aa, Artificial
  DENV1 E Protein WT
MRCVGIGNRDFVEGLSGATWVDVVLEHGSCVTTMAKDKPTLDIELLKTEVTNPAVLRKLCIEAKISNTTTDSRCPTQGEATLVEEQDTNFVCRRTFVDRGWGNGCGLFGKGSLITCAKFKCVTKLEGKIVQYENLKYSVIVTVHTGDQHQVGNETTEHGTTATITPQAPTSEIQLTDYGALTLDCSPRTGLDFNEMVLLTMEKKSWLVHKQWFLDLPLPWTSGASTSQETWNRQDLLVTFKTAHAKKQEVVVLGSQEGAMHTALTGATEIQTSGTTTIFAGHLKCRLKMDKLTLKGMSYVMCTGSFKLEKEVAETQHGTVLVQVKYEGTDAPCKIPFSSQDEKGVTQNGRLITANPIVTDKEKPVNIEAEPPFGESYIVVGAGEKALKLSWFKK

SEQ ID NO: 54 - protein, 394 aa, Artificial
  DENV1 EDE1 Null Mutant- Core
MRCVGIGNRDFVEGLSGATWVDVVLEHGSCVTTMAKDKPTLDIELLKTEVTNPAVLRKLCIEAKISNTETRAKCPTQGEATLVEEQDTNFVCRRTFVDRGWDSGCGLFGKGSLITCAKFKCVTKLEGKIVQYENLKYSVIVTVHTGDQHQVGNETTEHGTIATITPQAPTSEIQLTDYGALTLDCSPRTGLDFNEMVLLTMKKKSWLVHKQWFLDLPLPWTSGASTSQETWNRQDLLVTFKTAHATYIPVVVLGSQEGAMHTALTGATEIQTSGTTTIFAGHLKCRLKMDKLTLKGMSYVMCTGSFKLEKEVAETQHGTVLVQVKYEGTDAPCKIPFSSQDEKGVTQNGRLITANPIVTDKEKPVNIEAEPPFGESYIVVGAGEKALKLSWFKK

SEQ ID NO: 55 - protein, 394 aa, Artificial
  DENV1 EDE1 Null Mutant- Core and Specific
MHCVGIGNRDFVEGLSGATWVDVVLEHDSCVTTMAKDKPTLDITVLKTEVTNPAVLRKLCIEAKISNTETRAKCPTAGEATIVEEQDTNFVCRRTFVDRGWDSGCFLFGKGSLITCAKFKCVTKLEGKIVQYENLKYSVIVTVHTGDNHKVGNETTEKGTIATITPQAPTSEIQLTDYGALTLDCSPRTGLDFNEMVLLTMKKKSWLVHKQWFLDLPLPWTSGASTSQETWNRQDLLVTFKTAHATYIPVVVLGSQEGAMHTALTGATEIKTSGTTTIFAGHLKCRLKMDKLTLKGMSYVMCTGSFKLESGVAETQHGTVLVLVGYEGTDAPCKIPFSSQDEKGVTQNGRLITANPIVTDKEKPVNIEAEPPFGESYIVVGAGEKALKLSWFKK

SEQ ID NO: 56 - protein, 394 aa, Artificial
  DENV1 EDE1 Null Mutant- Specific
MHCVGIGNRDFVEGLSGATWVDVVLEHDSCVTTMAKDKPTLDITVLKTEVTNPAVLRKLCIEAKISNTTTDSRCPTAGEATIVEEQDTNFVCRRTFVDRGWGNGCFLFGKGSLITCAKFKCVTKLEGKIVQYENLKYSVIVTVHTGDNHKVGNETTEKGTIATITPQAPTSEIQLTDYGALTLDCSPRTGLDFNEMVLLTMKKKSWLVHKQWFLDLPLPWTSGASTSQETWNRQDLLVTFKTAHAKKQEVVVLGSQEGAMHTALTGATEIKTSGTTTIFAGHLKCRLKMDKLTLKGMSYVMCTGSFKLESGVAETQHGTVLVLVGYEGTDAPCKIPFSSQDEKGVTQNGRLITANPIVTDKEKPVNIEAEPPFGESYIVVGAGEKALKLSWFKK

SEQ ID NO: 57 - protein, 394 aa, Artificial
  DENV2 EDE1 Null Mutant- Core
MRCIGISNRDFVEGVSGGSWVDIVLEHGSCVTTMAKNKPTLDFELIKTEAKQPATLRKYCIEAKLTNTETRAKCPTQGEPSLNEEQDKRFVCKHSMVDRGWDSGCGLFGKGGIVTCAMFTCKKNMEGKVVQPENLEYTIVVTPHSGEEHAVGNDTGKHGKIIKVTPQSSITEAELTGYGTVTMECSPRTGLDFNEMVLLQMKNKAWLVHRQWFLDLPLPWLPGADTQGSNWIQKETLVTFKNPHATYIPVVVLGSQEGAMHTALTGATEIQMSSGNLLFTGHLKCRLRMDKLQLKGMSYSMCTGKFKVVKEIAETQHGTIVIRVQYEGDGSPCKIPFEIMDLEKRHVLGRLITVNPIVTEKDSPVNIEAEPPFGDSYIIIGVDPGQLKLNWFKK

SEQ ID NO: 58 - protein, 394 aa, Artificial
  DENV2 EDE1 Null Mutant- Core and Specific
MHCIGISNRDFVEGVSGGSWVDIVLEHDSCVTTMAKNKPTLDFTVIKTEAKQPATLRKYCIEAKLTNTETRAKCPTAGEPSINEEQDKRFVCKHSMVDRGWDSGCFLFGKGGIVTCAMFTCKKNMEGKVVQPENLEYTIVVTPHSGENHKVGNDTGKKGKIIKVTPQSSITEAELTGYGTVTMECSPRTGLDFNEMVLLQMKNKAWLVHRQWFLDLPLPWLPGADTQGSNWIQKETLVTFKNPHATYIPVVVLGSQEGAMHTALTGATEIKMSSGNLLFTGHLKCRLRMDKLQLKGMSYSMCTGKFKVVSGIAETQHGTIVILVGYEGDGSPCKIPFEIMDLEKRHVLGRLITVNPIVTEKDSPVNIEAEPPFGDSYIIIGVDPGQLKLNWFKK

SEQ ID NO: 59 - protein, 394 aa, Artificial
  DENV2 EDE1 Null Mutant- Specific
MHCIGISNRDFVEGVSGGSWVDIVLEHDSCVTTMAKNKPTLDFTVIKTEAKQPATLRKYCIEAKLTNTTTESRCPTAGEPSINEEQDKRFVCKHSMVDRGWGNGCFLFGKGGIVTCAMFTCKKNMEGKVVQPENLEYTIVVTPHSGENHKVGNDTGKKGKIIKVTPQSSITEAELTGYGTVTMECSPRTGLDFNEMVLLQMKNKAWLVHRQWFLDLPLPWLPGADTQGSNWIQKETLVTFKNPHAKKQDVVVLGSQEGAMHTALTGATEIKMSSGNLLFTGHLKCRLRMDKLQLKGMSYSMCTGKFKVVSGIAETQHGTIVILVGYEGDGSPCKIPFEIMDLEKRHVLGRLITVNPIVTEKDSPVNIEAEPPFGDSYIIIGVDPGQLKLNWFKK

SEQ ID NO: 60 - protein, 392 aa, Artificial
  DENV3 EDE1 Null Mutant- Core
MRCVGIGNRDFVEGLSGATWVDVVLEHGGCVTTMAKNKPTLDIELQKTEATQLATLRKLCIEGKITNIETRAKCPTQGEAVLPEEQDQNYVCKHTYVDRGWDSGCGLFGKGSLVTCAKFQCLEPIEGKVVQYENLKYTVIITVHTGDQHQVGNETQGVIAEITPQASTTEAILPEYGTLGLECSPRTGLDFNEMILLTMKNKAWMVHRQWFFDLPLPWTSGATTETPTWNRKELLVTFKNAHATYIPVVVLGSQEGAMHTALTGATEIQNSGGTSIFAGHLKCRLKMDKLELKGMSYAMCTNTFVLKKEVSETQHGTILIKVEYKGEDAPCKIPFSTEDGQGKAHNGRLITANPVVTKKEEPVNIEAEPPFGESNIVIGIGDNALKINWYKK

SEQ ID NO: 61 - protein, 392 aa, Artificial
  DENV3 EDE1 Null Mutant- Core and Specific
MHCVGIGNRDFVEGLSGATWVDVVLEHDGCVTTMAKNKPTLDITVQKTEATQLATLRKLCIEGKITNIETRAKCPTAGEAVIPEEQDQNYVCKHTYVDRGWDSGCFLFGKGSLVTCAKFQCLEPIEGKVVQYENLKYTVIITVHTGDNHKVGNETKGVIAEITPQASTTEAILPEYGTLGLECSPRTGLDFNEMILLTMKNKAWMVHRQWFFDLPLPWTSGATTETPTWNRKELLVTFKNAHATYIPVVVLGSQEGAMHTALTGATEIKNSGGTSIFAGHLKCRLKMDKLELKGMSYAMCTNTFVLKSGVSETQHGTILILVGYKGEDAPCKIPFSTEDGQGKAHNGRLITANPVVTKKEEPVNIEAEPPFGESNIVIGIGDNALKINWYKK

SEQ ID NO: 62 - protein, 392 aa, Artificial
  DENV3 EDE1 Null Mutant- Specific
MHCVGIGNRDFVEGLSGATWVDVVLEHDGCVTTMAKNKPTLDITVQKTEATQLATLRKLCIEGKITNITTDSRCPTAGEAVIPEEQDQNYVCKHTYVDRGWGNGCFLFGKGSLVTCAKFQCLEPIEGKVVQYENLKYTVIITVHTGDNHKVGNETKGVIAEITPQASTTEAILPEYGTLGLECSPRTGLDFNEMILLTMKNKAWMVHRQWFFDLPLPWTSGATTETPTWNRKELLVTFKNAHAKKQEVVVLGSQEGAMHTALTGATEIKNSGGTSIFAGHLKCRLKMDKLELKGMSYAMCTNTFVLKSGVSETQHGTILILVGYKGEDAPCKIPFSTEDGQGKAHNGRLITANPVVTKKEEPVNIEAEPPFGESNIVIGIGDNALKINWYKK

SEQ ID NO: 63 - protein, 394 aa, Artificial
  DENV4 EDE1 Null Mutant- Core
MRCVGVGNRDFVEGVSGGAWVDLVLEHGGCVTTMAQGKPTLDFELTKTTAKEVALLRTYCIEASISNIETRAKCPTQGEPYLKEEQDQQYICRRDVVDRGWDSGCGLFGKGGVVTCAKFSCSGKITGNLVQIENLEYTVVVTVHNGDTHAVGNDTSNHGVIATITPRSPSVEVKLPDYGELTLDCEPRSGIDFNEMILMKMKKKTWLVHKQWFLDLPLPWTAGADTSEVHWNYKERMVTFKVPHATYIPVTVLGSQEGAMHSALAGATEVDSGDGNHMFAGHLKCKVRMEKLRIKGMSYTMCSGKFSIDKEMAETQHGTTVVKVKYEGAGAPCKVPIEIRDVNKEKVVGRVISSTPLAENTNSVTNIELEPPFGDSYIVIGVGNSALTLHWFRK

SEQ ID NO: 64 - protein, 394 aa, Artificial
  DENV4 EDE1 Null Mutant- Core and Specific
MHCVGVGNRDFVEGVSGGAWVDLVLEHDGCVTTMAQGKPTLDFTVTKTTAKEVALLRTYCIEASISNIETRAKCPTAGEPYIKEEQDQQYICRRDVVDRGWDSGCFLFGKGGVVTCAKFSCSGKITGNLVQIENLEYTVVVTVHNGDNHKVGNDTSNKGVIATITPRSPSVEVKLPDYGELTLDCEPRSGIDFNEMILMKMKKKTWLVHKQWFLDLPLPWTAGADTSEVHWNYKERMVTFKVPHATYIPVTVLGSQEGAMHSALAGATEVKSGDGNHMFAGHLKCKVRMEKLRIKGMSYTMCSGKFSIDSGMAETQHGTTVVLVGYEGAGAPCKVPIEIRDVNKEKVVGRVISSTPLAENTNSVTNIELEPPFGDSYIVIGVGNSALTLHWFRK

SEQ ID NO: 65 - protein, 394 aa, Artificial
  DENV4 EDE1 Null Mutant- Specific
MHCVGVGNRDFVEGVSGGAWVDLVLEHDGCVTTMAQGKPTLDFTVTKTTAKEVALLRTYCIEASISNITTATRCPTAGEPYIKEEQDQQYICRRDVVDRGWGNGCFLFGKGGVVTCAKFSCSGKITGNLVQIENLEYTVVVTVHNGDNHKVGNDTSNKGVIATITPRSPSVEVKLPDYGELTLDCEPRSGIDFNEMILMKMKKKTWLVHKQWFLDLPLPWTAGADTSEVHWNYKERMVTFKVPHAKRQDVTVLGSQEGAMHSALAGATEVKSGDGNHMFAGHLKCKVRMEKLRIKGMSYTMCSGKFSIDSGMAETQHGTTVVLVGYEGAGAPCKVPIEIRDVNKEKVVGRVISSTPLAENTNSVTNIELEPPFGDSYIVIGVGNSALTLHWFRK

SEQ ID NO: 66 - protein, 404 aa, Artificial
  ZIKV with DENV1 C10 Epitope
IRCIGVSNRDFVEGMSGGTWVDVVLEHGGCVTVMAQDKPTVDIELLKTTVSNMAVVRSYCYEASISNTTTDSRCPTQGEATLVEQSDTQYVCKRTLVDRGWGNGCGLFGKGSLVTCAKFACSKKMTGKSIQPENLEYSIILSVHGSQQSGMIVNQTGHETDENGAKVEITPNSPRAEATLTDFGALGLDCEPRTGLDFSDLYYLTMNNKHWLVHKEWFHDIPLPWHAGASTGTPHWNNKEALVEFKDAHAKKQEVVVLGSQEGAVHTALAGALEAQTSGAKGTLSSGHLKCRLKMDKLTLKGVSYSLCTAAFTFEKIPAETLHGTVTVQVKYAGTDGPCKVPAQMAVDMQTLTPVGRLITANPVITESEENKPMMLELDPPFGDSYIVIGVGEKKITHHWHRSG

SEQ ID NO: 67 - protein, 404 aa, Artificial
  ZIKV with DENV2 C10 Epitope
IRCIGVSNRDFVEGMSGGTWVDVVLEHGGCVTVMAQDKPTVDIELIKTTVSQMATVRSYCYEASISNTTTESRCPTQGEASLNEQSDTQYVCKRTLVDRGWGNGCGLFGKGSIVTCAKFACSKKMTGKSIQPENLEYTIVLSVHGSQESGMIVNATGHETDENGAKVEITPNSPRAEATLTGFGTLGLDCEPRTGLDFSDLYYLTMNNKHWLVHKEWFHDIPLPWHAGADTGTPHWNNKEALVEFKDAHAKKQDVVVLGSQEGAVHTALAGALEAQMSSAKGLLSSGHLKCRLKMDKLQLKGVSYSLCTAAFTFVKIPAETLHGTVTVRVQYAGTDGPCKVPAQMAVDMQTLTPVGRLITANPVITESDENSPMMLELDPPFGDSYIVIGVGEKKITHHWHRSG

SEQ ID NO: 68 - protein, 404 aa, Artificial
  ZIKV with DENV3 C10 Epitope
IRCIGVSNRDFVEGMSGGTWVDVVLEHGGCVTVMAQDKPTVDIELQKTTVSQMATVRSYCYEASISNITTDSRCPTQGEAVLPEQSDTQYVCKRTLVDRGWGNGCGLFGKGSLVTCAKFACSKKMTGKSIQPENLEYTIILSVHGSQQSGMIVNQTGHETDENGAKVEITPNSPRAEATLPEFGTLGLDCEPRTGLDFSDLYYLTMNNKHWLVHKEWFHDIPLPWHAGATTGTPHWNNKEALVEFKDAHAKKQEVVVLGSQEGAVHTALAGALEAQNSGAKGSLSSGHLKCRLKMDKLELKGVSYSLCTAAFTFKKIPAETLHGTVTVKVEYAGTDGPCKVPAQMAVDMQTLTPVGRLITANPVITESEENEPMMLELDPPFGDSYIVIGVGEKKITHHWHRSG

SEQ ID NO: 69 - protein, 404 aa, Artificial
  ZIKV with DENV4 C10 Epitope
IRCIGVSNRDFVEGMSGGTWVDVVLEHGGCVTVMAQDKPTVDIELTKTTVSEMALVRSYCYEASISNITTATRCPTQGEAYLKEQSDTQYVCKRTLVDRGWGNGCGLFGKGSVVTCAKFACSKKMTGKSIQPENLEYTIVLSVHGSQTSGMIVNATGHETDENGAKVEITPNSPRAEATLPDFGELGLDCEPRTGLDFSDLYYLTMNNKHWLVHKEWFHDIPLPWHAGADTGTPHWNNKEALVEFKDAHAKRQDVVVLGSQEGAVHTALAGALEADSGDAKGHLSSGHLKCRLKMDKLRLKGVSYSLCTAAFTFDKIPAETLHGTVTVKVKYAGTDGPCKVPAQMAVDMQTLTPVGRLITANPVITESNENSVMMLELDPPFGDSYIVIGVGEKKITHHWHRSG

SEQ ID NO: 70 - protein, 399 aa, Artificial
  ZIKV with DENV1 C10 Epitope- Non-neurotropic
IRCIGVSNRDFVEGMSGGTWVDVVLEHGGCVTVMAQDKPTVDIELLKTTVSNMAVVRSYCYEASISNTTTDSRCPTQGEATLVEQSDTQYVCKRTLVDRGWGNGCGLFGKGSLVTCAKFACSKKMTGKSIQPENLEYSIILSVHGSQQNQTGHETDENGAKVEITPNSPRAEATLTDFGALGLDCEPRTGLDFSDLYYLTMNNKHWLVHKEWFHDIPLPWHAGASTGTPHWNNKEALVEFKDAHAKKQEVVVLGSQEGAVHTALAGALEAQTSGAKGTLSSGHLKCRLKMDKLTLKGVSYSLCTAAFTFEKIPAETLHGTVTVQVKYAGTDGPCKVPAQMAVDMQTLTPVGRLITANPVITESEENKPMMLELDPPFGDSYIVIGVGEKKITHHWHRSG

SEQ ID NO: 71 - protein, 399 aa, Artificial
  ZIKV with DENV2 C10 Epitope- Non-neurotropic
IRCIGVSNRDFVEGMSGGTWVDVVLEHGGCVTVMAQDKPTVDIELIKTTVSQMATVRSYCYEASISNTTTESRCPTQGEASLNEQSDTQYVCKRTLVDRGWGNGCGLFGKGSIVTCAKFACSKKMTGKSIQPENLEYTIVLSVHGSQENATGHETDENGAKVEITPNSPRAEATLTGFGTLGLDCEPRTGLDFSDLYYLTMNNKHWLVHKEWFHDIPLPWHAGADTGTPHWNNKEALVEFKDAHAKKQDVVVLGSQEGAVHTALAGALEAQMSSAKGLLSSGHLKCRLKMDKLQLKGVSYSLCTAAFTFVKIPAETLHGTVTVRVQYAGTDGPCKVPAQMAVDMQTLTPVGRLITANPVITESDENSPMMLELDPPFGDSYIVIGVGEKKITHHWHRSG

SEQ ID NO: 72 - protein, 399 aa, Artificial
  ZIKV with DENV3 C10 Epitope- Non-neurotropic
IRCIGVSNRDFVEGMSGGTWVDVVLEHGGCVTVMAQDKPTVDIELQKTTVSQMATVRSYCYEASISNITTDSRCPTQGEAVLPEQSDTQYVCKRTLVDRGWGNGCGLFGKGSLVTCAKFACSKKMTGKSIQPENLEYTIILSVHGSQQNQTGHETDENGAKVEITPNSPRAEATLPEFGTLGLDCEPRTGLDFSDLYYLTMNNKHWLVHKEWFHDIPLPWHAGATTGTPHWNNKEALVEFKDAHAKKQEVVVLGSQEGAVHTALAGALEAQNSGAKGSLSSGHLKCRLKMDKLELKGVSYSLCTAAFTFKKIPAETLHGTVTVKVEYAGTDGPCKVPAQMAVDMQTLTPVGRLITANPVITESEENEPMMLELDPPFGDSYIVIGVGEKKITHHWHRSG

SEQ ID NO: 73 - protein, 399 aa, Artificial
  ZIKV with DENV4 C10 Epitope- Non-neurotropic
IRCIGVSNRDFVEGMSGGTWVDVVLEHGGCVTVMAQDKPTVDIELTKTTVSEMALVRSYCYEASISNITTATRCPTQGEAYLKEQSDTQYVCKRTLVDRGWGNGCGLFGKGSVVTCAKFACSKKMTGKSIQPENLEYTIVLSVHGSQTNATGHETDENGAKVEITPNSPRAEATLPDFGELGLDCEPRTGLDFSDLYYLTMNNKHWLVHKEWFHDIPLPWHAGADTGTPHWNNKEALVEFKDAHAKRQDVVVLGSQEGAVHTALAGALEADSGDAKGHLSSGHLKCRLKMDKLRLKGVSYSLCTAAFTFDKIPAETLHGTVTVKVKYAGTDGPCKVPAQMAVDMQTLTPVGRLITANPVITESNENSVMMLELDPPFGDSYIVIGVGEKKITHHWHRSG

SEQ ID NO: 74 - protein, 404 aa, Artificial
  ZIKV with DENV1 C8 Epitope
IRCIGVSNRDFVEGMSGGTWVDVVLEHGGCVTVMAQDKPTVDIELVTTTVSNMAEVRSYCYEASISNTTTDSRCPTQGEAYLVEQSDTQYVCKRTLVDRGWGNGCGLFGKGSLVTCAKFACSKKMTGKSIQPENLEYRIMLSVHGSQQSGMIVNDTGHETDEHRAKVEITPNSPRAEATLGGFGSLGLDCEPRTGLDFSDLYYLTMNNKHWLVHKEWFHDIPLPWHAGADTGTPHWNNKEALVEFKDAHAKKQEVVVLGSQEGAVHTALAGALEAEMSGAKGRLSSGHLKCRLKMDKLRLKGVSYSLCTAAFTFEKEPAETLHGTVTVQVKYAGTDGPCKVPAQMAVDMQTLTPVGRLITANPVITESTENSKMMLELDPPFGDSYIVIGVGEKKITHHWHRSG

SEQ ID NO: 75 - protein, 404 aa, Artificial
  ZIKV with DENV2 C8 Epitope
IRCIGVSNRDFVEGMSGGTWVDVVLEHGGCVTVMAQDKPTVDIELVTTTVSNMAEVRSYCYEASISNTTTESRCPTQGEAYLNEQSDTQYVCKRTLVDRGWGNGCGLFGKGSIVTCAKFACSKKMTGKSIQPENLEYRIMLSVHGSQESGMIVNDTGHETDEHRAKVEITPNSPRAEATLGGFGSLGLDCEPRTGLDFSDLYYLTMNNKHWLVHKEWFHDIPLPWHAGADTGTPHWNNKEALVEFKDAHAKKQDVVVLGSQEGAVHTALAGALEAEMSSAKGRLSSGHLKCRLKMDKLRLKGVSYSLCTAAFTFVKEPAETLHGTVTVRVQYAGTDGPCKVPAQMAVDMQTLTPVGRLITANPVITESTENSKMMLELDPPFGDSYIVIGVGEKKITHHWHRSG

SEQ ID NO: 76 - protein, 404 aa, Artificial
  ZIKV with DENV3 C8 Epitope
IRCIGVSNRDFVEGMSGGTWVDVVLEHGGCVTVMAQDKPTVDIELVTTTVSNMAEVRSYCYEASISNITTDSRCPTQGEAYLPEQSDTQYVCKRTLVDRGWGNGCGLFGKGSLVTCAKFACSKKMTGKSIQPENLEYRIMLSVHGSQQSGMIVNDTGHETDEQRAKVEITPNSPRAEATLGGFGSLGLDCEPRTGLDFSDLYYLTMNNKHWLVHKEWFHDIPLPWHAGADTGTPHWNNKEALVEFKDAHAKKQEVVVLGSQEGAVHTALAGALEAEMSGAKGRLSSGHLKCRLKMDKLRLKGVSYSLCTAAFTFKKEPAETLHGTVTVKVEYAGTDGPCKVPAQMAVDMQTLTPVGRLITANPVITESTENSKMMLELDPPFGDSYIVIGVGEKKITHHWHRSG

SEQ ID NO: 77 - protein, 404 aa, Artificial
  ZIKV with DENV4 C8 Epitope
IRCIGVSNRDFVEGMSGGTWVDVVLEHGGCVTVMAQDKPTVDIELVTTTVSNMAEVRSYCYEASISNITTATRCPTQGEAYLKEQSDTQYVCKRTLVDRGWGNGCGLFGKGSVVTCAKFACSKKMTGKSIQPENLEYRIMLSVHGSQTSGMIVNDTGHETDEHRAKVEITPNSPRAEATLGGFGSLGLDCEPRTGLDFSDLYYLTMNNKHWLVHKEWFHDIPLPWHAGADTGTPHWNNKEALVEFKDAHAKRQDVVVLGSQEGAVHTALAGALEAEMGDAKGRLSSGHLKCRLKMDKLRLKGVSYSLCTAAFTFDKEPAETLHGTVTVKVKYAGTDGPCKVPAQMAVDMQTLTPVGRLITANPVITESTENSKMMLELDPPFGDSYIVIGVGEKKITHHWHRSG

SEQ ID NO: 78 - protein, 394 aa, Artificial
  DENV1 E glycoprotein with ZIKV C10
MRCVGIGNRDFVEGLSGATWVDVVLEHGSCVTTMAKDKPTLDIELVTTEVTNPAELRKLCIEAKISDMASDSRCPTQGEAYLDKEQDTNFVCRRTFVDRGWGNGCGLFGKGSLITCAKFKCVTKLEGKIVQYENLKYRVMVTVHTGDHHDVGNETTEHRTTATITPQAPTSEIQLGGYGSLTLDCSPRTGLDFNEMVLLTMEKKSWLVHKQWFLDLPLPWTSGADTSQETWNRQDLLVTFKTAHAKRQTVVVLGSQEGAMHTALTGATEIEMDGTTRIFAGHLKCRLKMDKLRLKGMSYVMCTGSFKLTKEVAETQHGTVLVEVQYEGTDAPCKIPFSSQDEKGVTQNGRLITANPIVTDKTSKVNIEAEPPFGESYIVVGAGEKALKLSWFKK

SEQ ID NO: 79 - protein, 394 aa, Artificial
  DENV2 E glycoprotein with ZIKV C10
MRCIGISNRDFVEGVSGGSWVDIVLEHGSCVTTMAKNKPTLDFELVTTEAKNPAELRKYCIEAKLTDMASDSRCPTQGEPYLDKEQDKRFVCKHSMVDRGWGNGCGLFGKGGLVTCAMFTCKKNMEGKVVQPENLEYRIMVTPHSGEHHDVGNDTGKHRKEIKVTPQSSITEAELGGYGSVTMECSPRTGLDFNEMVLLQMENKAWLVHRQWFLDLPLPWLPGADTQGSNWIQKETLVTFKNPHAKRQTVVVLGSQEGAMHTALTGATEIEMDGGNRLFTGHLKCRLRMDKLRLKGMSYSMCTGKFKVTKEIAETQHGTIVIEVQYEGDGSPCKIPFEIMDLEKRHVLGRLITVNPIVTEKTSKVNIEAEPPFGDSYIIIGVDPGQLKLNWFKK

SEQ ID NO: 80 - protein, 392 aa, Artificial
  DENV3 E glycoprotein with ZIKV C10
MRCVGIGNRDFVEGLSGATWVDVVLEHGGCVTTMAKNKPTLDIELVTTEATNLAELRKLCIEGKITDMASDSRCPTQGEAYLDKEQDQNYVCKHTYVDRGWGNGCGLFGKGSLVTCAKFQCLEPIEGKVVQYENLKYRVMITVHTGDHHDVGNETQRVTAEITPQASTTEAILGGYGSLGLECSPRTGLDFNEMILLTMKNKAWMVHRQWFFDLPLPWTSGADTETPTWNRKELLVTFKNAHAKRQTVVVLGSQEGAMHTALTGATEIEMDGGTRIFAGHLKCRLKMDKLRLKGMSYAMCTNTFVLTKEVSETQHGTILIEVQYKGEDAPCKIPFSTEDGQGKAHNGRLITANPVVTKKTSKVNIEAEPPFGESNIVIGIGDNALKINWYKK

SEQ ID NO: 81 - protein, 394 aa, Artificial
  DENV4 E glycoprotein with ZIKV C10
MRCVGVGNRDFVEGVSGGAWVDLVLEHGGCVTTMAQGKPTLDFELVTTTAKNVAELRTYCIEASISDMASDSRCPTQGEPYLDKEQDQQYICRRDVVDRGWGNGCGLFGKGGLVTCAKFSCSGKITGNLVQIENLEYRVMVTVHNGDHHDVGNDTSNHRVTATITPRSPSVEVKLGGYGSLTLDCEPRSGIDFNEMILMKMKKKTWLVHKQWFLDLPLPWTAGADTSEVHWNYKERMVTFKVPHAKRQTVTVLGSQEGAMHSALAGATEVEMDGGNRMFAGHLKCKVRMEKLRIKGMSYTMCSGKFSITKEMAETQHGTTVVEVQYEGAGAPCKVPIEIRDVNKEKVVGRVISSTPLAENTTSKTNIELEPPFGDSYIVIGVGNSALTLHWFRK

SEQ ID NO: 82 - protein, 402 aa, Artificial
  DENV1 E glycoprotein with ZIKV C10- Neurotropic insertions
MRCVGIGNRDFVEGLSGATWVDVVLEHGSCVTTMAKDKPTLDIELVTTEVTNPAELRKLCIEAKISDMASDSRCPTQGEAYLDKEQDTNFVCRRTFVDRGWGNGCGLFGKGSLITCAKFKCVTKLEGKIVQYENLKYRVMVTVHTGDHSGMIVHDVGNETTEHRTTATITPQAPTSEIQLGGYGSLTLDCSPRTGLDFNEMVLLTMEKKSWLVHKQWFLDLPLPWTSGADTSQETWNRQDLLVTFKTAHAKRQTVVVLGSQEGAMHTALTGATEIEMDGTTGRIFAGHLKCRLKMDKLRLKGMSYVMCTGSFKLTKEVAETQHGTVLVEVQYEGTDAPCKIPFSSQDEKGVTQNGRLITANPIVTDKTENSKVNIEAEPPFGESYIVVGAGEKALKLSWFKK

SEQ ID NO: 83 - protein, 402 aa, Artificial
  DENV2 E glycoprotein with ZIKV C10- Neurotropic insertions
MRCIGISNRDFVEGVSGGSWVDIVLEHGSCVTTMAKNKPTLDFELVTTEAKNPAELRKYCIEAKLTDMASDSRCPTQGEPYLDKEQDKRFVCKHSMVDRGWGNGCGLFGKGGLVTCAMFTCKKNMEGKVVQPENLEYRIMVTPHSGEHSGMIVHDVGNDTGKHRKEIKVTPQSSITEAELGGYGSVTMECSPRTGLDFNEMVLLQMENKAWLVHRQWFLDLPLPWLPGADTQGSNWIQKETLVTFKNPHAKRQTVVVLGSQEGAMHTALTGATEIEMDGGNGRLFTGHLKCRLRMDKLRLKGMSYSMCTGKFKVTKEIAETQHGTIVIEVQYEGDGSPCKIPFEIMDLEKRHVLGRLITVNPIVTEKTENSKVNIEAEPPFGDSYIIIGVDPGQLKLNWFKK

SEQ ID NO: 84 - protein, 400 aa, Artificial
  DENV3 E glycoprotein with ZIKV C10- Neurotropic insertions
MRCVGIGNRDFVEGLSGATWVDVVLEHGGCVTTMAKNKPTLDIELVTTEATNLAELRKLCIEGKITDMASDSRCPTQGEAYLDKEQDQNYVCKHTYVDRGWGNGCGLFGKGSLVTCAKFQCLEPIEGKVVQYENLKYRVMITVHTGDHSGMIVHDVGNETQRVTAEITPQASTTEAILGGYGSLGLECSPRTGLDFNEMILLTMKNKAWMVHRQWFFDLPLPWTSGADTETPTWNRKELLVTFKNAHAKRQTVVVLGSQEGAMHTALTGATEIEMDGGTGRIFAGHLKCRLKMDKLRLKGMSYAMCTNTFVLTKEVSETQHGTILIEVQYKGEDAPCKIPFSTEDGQGKAHNGRLITANPVVTKKTENSKVNIEAEPPFGESNIVIGIGDNALKINWYKK

SEQ ID NO: 85 - protein, 402 aa, Artificial
  DENV4 E glycoprotein with ZIKV C10- Neurotropic insertions
MRCVGVGNRDFVEGVSGGAWVDLVLEHGGCVTTMAQGKPTLDFELVTTTAKNVAELRTYCIEASISDMASDSRCPTQGEPYLDKEQDQQYICRRDVVDRGWGNGCGLFGKGGLVTCAKFSCSGKITGNLVQIENLEYRVMVTVHNGDHSGMIVHDVGNDTSNHRVTATITPRSPSVEVKLGGYGSLTLDCEPRSGIDFNEMILMKMKKKTWLVHKQWFLDLPLPWTAGADTSEVHWNYKERMVTFKVPHAKRQTVTVLGSQEGAMHSALAGATEVEMDGGNGRMFAGHLKCKVRMEKLRIKGMSYTMCSGKFSITKEMAETQHGTTVVEVQYEGAGAPCKVPIEIRDVNKEKVVGRVISSTPLAENTTENSKTNIELEPPFGDSYIVIGVGNSALTLHWFRK

SEQ ID NO: 86 - protein, 394 aa, Artificial
  DENV1 E glycoprotein with ZIKV C8
MRCVGIGNRDFVEGLSGATWVDVVLEHGSCVTTMAKDKPTLDIELLKTEVTNPAVLRKLCIEAKISDMASDSRCPTQGEATLDKEQDTNFVCRRTFVDRGWGNGCGLFGKGSLITCAKFKCVTKLEGKIVQYENLKYSVIVTVHTGDHHQVGNETTENGTTATITPQAPTSEIQLTDYGALTLDCSPRTGLDFNEMVLLTMEKKSWLVHKQWFLDLPLPWTSGASTSQETWNRQDLLVTFKTAHAKRQTVVVLGSQEGAMHTALTGATEIQTDGTTTIFAGHLKCRLKMDKLTLKGMSYVMCTGSFKLTKIVAETQHGTVLVEVQYEGTDAPCKIPFSSQDEKGVTQNGRLITANPIVTDKEKPVNIEAEPPFGESYIVVGAGEKALKLSWFKK

SEQ ID NO: 87 - protein, 394 aa, Artificial
  DENV2 E glycoprotein with ZIKV C8
MRCIGISNRDFVEGVSGGSWVDIVLEHGSCVTTMAKNKPTLDFELIKTEAKQPATLRKYCIEAKLTDMASDSRCPTQGEPSLDKEQDKRFVCKHSMVDRGWGNGCGLFGKGGLVTCAMFTCKKNMEGKVVQPENLEYTIVVTPHSGEHHAVGNDTGKNGKEIKVTPQSSITEAELTGYGTVTMECSPRTGLDFNEMVLLQMENKAWLVHRQWFLDLPLPWLPGADTQGSNWIQKETLVTFKNPHAKRQTVVVLGSQEGAMHTALTGATEIQMDGGNLLFTGHLKCRLRMDKLQLKGMSYSMCTGKFKVTKIIAETQHGTIVIEVQYEGDGSPCKIPFEIMDLEKRHVLGRLITVNPIVTEKDSPVNIEAEPPFGDSYIIIGVDPGQLKLNWFKK

SEQ ID NO: 88 - protein, 392 aa, Artificial
  DENV3 E glycoprotein with ZIKV C8
MRCVGIGNRDFVEGLSGATWVDVVLEHGGCVTTMAKNKPTLDIELQKTEATQLATLRKLCIEGKITDMASDSRCPTQGEAYLDKEQDQNYVCKHTYVDRGWGNGCGLFGKGSLVTCAKFQCLEPIEGKVVQYENLKYTVIITVHTGDHHQVGNETNGVTAEITPQASTTEAILPEYGTLGLECSPRTGLDFNEMILLTMKNKAWMVHRQWFFDLPLPWTSGATTETPTWNRKELLVTFKNAHAKRQTVVVLGSQEGAMHTALTGATEIQNDGGTSIFAGHLKCRLKMDKLELKGMSYAMCTNTFVLTKEVSETQHGTILIEVQYKGEDAPCKIPFSTEDGQGKAHNGRLITANPVVTKKEEPVNIEAEPPFGESNIVIGIGDNALKINWYKK

SEQ ID NO: 89 - protein, 394 aa, Artificial
  DENV4 E glycoprotein with ZIKV C8
MRCVGVGNRDFVEGVSGGAWVDLVLEHGGCVTTMAQGKPTLDFELTKTTAKEVALLRTYCIEASISDMASDSRCPTQGEPYLDKEQDQQYICRRDVVDRGWGNGCGLFGKGGLVTCAKFSCSGKITGNLVQIENLEYTVVVTVHNGDHHAVGNDTSNNGVTATITPRSPSVEVKLPDYGELTLDCEPRSGIDFNEMILMKMKKKTWLVHKQWFLDLPLPWTAGADTSEVHWNYKERMVTFKVPHAKRQTVTVLGSQEGAMHSALAGATEVDSDGGNHMFAGHLKCKVRMEKLRIKGMSYTMCSGKFSITKIMAETQHGTTVVEVQYEGAGAPCKVPIEIRDVNKEKVVGRVISSTPLAENTNSVTNIELEPPFGDSYIVIGVGNSALTLHWFRK

SEQ ID NO: 90 - DNA, 10735 bp, Artificial
  DENV-1 WestPac74-EDE Null-EDE1-Specific-Viral Genome
agttgttagtctacgtggaccgacaagaacagtttcgaatcggaagcttgcttaacgtagttctaacagttttttattagagagcagatctctgatgaacaaccaacggaaaaagacgggtcgaccgtctttcaatatgctgaaacgcgcgagaaaccgcgtgtcaactgtttcacagttggcgaagagattctcaaaaggattgctttcaggccaaggacccatgaaattggtgatggcttttatagcattcctaagatttctagccatacctccaacagcaggaattttggctagatggggctcattcaagaagaatggagcgatcaaagtgttacggggtttcaagaaagaaatctcaaacatgttgaacataatgaacaggaggaaaagatctgtgaccatgctcctcatgctgctgcccacagccctggcgttccatctgaccacccgagggggagagccgcacatgatagttagcaagcaggaaagaggaaaatcacttttgtttaagacctctgcaggtgtcaacatgtgcacccttattgcaatggatttgggagagttatgtgaggacacaatgacctacaaatgcccccggatcactgagacggaaccagatgacgttgactgttggtgcaatgccacggagacatgggtgacctatggaacatgttctcaaactggtgaacaccgacgagacaaacgttccgtcgcactggcaccacacgtagggcttggtctagaaacaagaaccgaaacgtggatgtcctctgaaggcgcttggaaacaaatacaaaaagtggagacctgggctctgagacacccaggattcacggtgatagccctttttctagcacatgccataggaacatccatcacccagaaagggatcatttttattttgctgatgctggtaactccatccatggccatgcattgcgtgggaataggcaacagagacttcgtggaaggactgtcaggagctacgtgggtggatgtggtactggagcatgacagttgcgtcactaccatggcaaaagacaaaccaacactggacattactgtattgaagacggaggtcacaaaccctgccgtcctgcgcaaactgtgcattgaagctaaaatatcaaacaccaccaccgattcgagatgtccaacagccggagaagccacgatcgtggaagaacaggacacgaactttgtgtgtcgacgaacgttcgtggacagaggctggggcaatggttgtttcctattcggaaaaggtagcttaataacgtgtgctaagtttaagtgtgtgacaaaactggaaggaaagatagtccaatatgaaaacttaaaatattcagtgatagtcaccgtacacactggagacaaccacaaggttggaaatgagaccacagaaaagggaacaattgcaaccataacacctcaagctcccacgtcggaaatacagctgacagactacggagctctaacattggattgttcacctagaacagggctagactttaatgagatggtgttgttgacaatgaaaaaaaaatcatggctcgtccacaaacaatggtttctagacttaccactgccttggacctcgggggcttcaacatcccaagagacttggaatagacaagacttgctggtcacatttaagacagctcatgcaaaaaagcaggaagtagtcgtactaggatcacaagaaggagcaatgcacactgcgttgactggagcgacagaaatcaagacgtctggaacgacaacaatttttgcaggacacctgaaatgcagactaaaaatggataaactgactttaaaagggatgtcatatgtaatgtgcacagggtcattcaagttagagtctggtgtggctgagacccagcatggaactgttctagtgctcgttggttacgaaggaacagatgcaccatgcaagatccccttctcgtcccaagatgagaagggagtaacccagaatgggagattgataacagccaaccccatagtcactgacaaagaaaaaccagtcaacattgaagcggagccaccttttggtgagagctacattgtggtaggagcaggtgaaaaagctttgaaactaagctggttcaagaagggaagcagtatagggaaaatgtttgaagcaactgcccgtggagcacgaaggatggccatcctgggagacactgcatgggacttcggttctataggaggggtgttcacgtctgtgggaaaactgatacaccagatttttgggactgcgtatggagttttgttcagcggtgtttcttggaccatgaagataggaatagggattctgctgacatggctaggattaaactcaaggagcacgtccctttcaatgacgtgtatcgcagttggcatggtcacgctgtacctaggagtcatggttcaggcggactcgggatgtgtaatcaactggaaaggcagagaactcaaatgtggaagcggcatttttgtcaccaatgaagtccacacctggacagagcaatataaattccaggccgactcccctaagagactatcagcggccattgggaaggcatgggaggagggtgtgtgtggaattcgatcagccactcgtctcgagaacatcatgtggaagcaaatatcaaatgaattaaaccacatcttacttgaaaatgacatgaaatttacagtggtcgtaggagacgttagtggaatcttggcccaaggaaagaaaatgattaggccacaacccatggaacacaaatactcgtggaaaagctggggaaaagccaaaatcataggagcagatgtacagaataccaccttcatcatcgacggcccaaacaccccagaatgccctgataaccaaagagcatggaacatttgggaagttgaagactatggatttggaattttcacgacaaacatatggttgaaattgcgtgactcctacactcaagtgtgtgaccaccggctaatgtcagctgccatcaaggatagcaaagcagtccatgctgacatggggtattggatagaaagtgaaaagaacgagacttggaagttggcaagagcctccttcatagaagttaagacatgcatctggccaaaatcccacactctatggagcaatggagtcctggaaagtgagatgataatcccaaagatatatggaggaccaatatctcagcacaactacagaccaggatatttcacacaaacagcagggccgtggcacttgggcaagttagaactagattttgatttatgtgaaggtaccactgttgttgtggatgaacattgtggaaatcgaggaccatctcttagaaccacaacagtcacaggaaagacaatccatgaatggtgctgtagatcttgcacgttaccccccctacgtttcaaaggagaagacgggtgctggtacggcatggaaatcagaccagtcaaggagaaggaagagaacctagttaagtcaatggtctctgcagggtcaggagaagtggacagtttttcactaggactgctatgcatatcaataatgatcgaagaggtaatgagatccagatggagcagaaaaatgctgatgactggaacattggctgtgttcctccttctcacaatgggacaattgacatggaatgatctgatcaggctatgtatcatggttggagccaacgcttcagacaagatggggatgggaacaacgtacctagctttgatggccactttcagaatgagaccaatgttcgcagtcgggctactgtttcgcagattaacatctagagaagttcttcttcttacagttggattgagtctggtggcatctgtagaactaccaaattccttagaggagctaggggatggacttgcaatgggcatcatgatgttgaaattactgactgattttcagtcacatcagctatgggctaccttgctgtctttaacatttgtcaaaacaactttttcattgcactatgcatggaagacaatggctatgatactgtcaattgtatctctcttccctttatgcctgtccacgacttctcaaaaaacaacatggcttccggtgttgctgggatctcttggatgcaaaccactaaccatgtttcttataacagaaaacaaaatctggggaaggaaaagctggcctctcaatgaaggaattatggctgttggaatagttagcattcttctaagttcacttctcaagaatgatgtgccactagctggcccactaatagctggaggcatgctaatagcatgttatgtcatatctggaagctcggccgatttatcactggagaaagcggctgaggtctcctgggaagaagaagcagaacactctggtgcctcacacaacatactagtggaggtccaagatgatggaaccatgaagataaaggatgaagagagagatgacacactcaccattctcctcaaagcaactctgctagcaatctcaggggtatacccaatgtcaataccggcgaccctctttgtgtggtatttttggcagaaaaagaaacagagatcaggagtgctatgggacacacccagccctccagaagtggaaagagcagtccttgatgatggcatttatagaattctccaaagaggattgttgggcaggtctcaagtaggagtaggagtttttcaagaaggcgtgttccacacaatgtggcacgtcaccaggggagctgtcctcatgtaccaagggaagagactggaaccaagttgggccagtgtcaaaaaagacttgatctcatatggaggaggttggaggtttcaaggatcctggaacgcgggagaagaagtgcaggtgattgctgttgaaccggggaagaaccccaaaaatgtacagacagcgccgggtaccttcaagacccctgaaggcgaagttggagccatagctctagactttaaacccggcacatctggatctcctatcgtgaacagagagggaaaaatagtaggtctttatggaaatggagtggtgacaacaagtggtacctacgtcagcgccatagctcaagctaaagcatcacaagaagggcctctaccagagattgaggacgaggtgtttaggaaaagaaacttaacaataatggacctacatccaggatcggggaaaacaagaagatatcttccagccatagtccgtgaggccataagaaggaacgtgcgcacgctagtcttagctcccacaagagttgtcgcttctgaaatggcagaggcgctcaagggaatgccaataaggtatcagacaacagcagtgaagagtgaacacacaggaaaagagatagttgaccttatgtgtcacgccactttcactatgcgtctcctgtctcctgtgagagttcccaattataatatgattatcatggatgaagcacatttcaccgatccagccagcatagcagccagagggtatatctcaacccgagtgggtatgggtgaagcagctgcgattttcatgacagccactccccccggatcggtggaggcctttccacagagcaatgcagttatccaagatgaggaaagagacattcctgaaagatcatggaactcaggctatgactggatcactgatttcccaggtaaaacagtctggtttgttccaagcatcaaatcaggaaatgacattgccaactgtttaagaaagaatgggaaacgggtggtccaattgagcagaaaaacttttgacactgagtaccagaaaacaaaaaataacgactgggactatgttgtcacaacagacatatccgaaatgggagcaaacttccgagccgacagggtaatagacccgaggcggtgcctgaaaccggtaatactaaaagatggcccagagcgtgtcattctagccggaccgatgccagtgactgtggctagcgccgcccagaggagaggaagaattggaaggaaccaaaataaggaaggcgatcagtatatttacatgggacagcctctaaacaatgatgaggaccacgcccattggacagaagcaaaaatgctccttgacaacataaacacaccagaagggattatcccagccctctttgagccggagagagaaaagagtgcagcaatagacggggaatacagactacggggtgaagcgaggaaaacgttcgtggagctcatgagaagaggagatctacctgtctggctatcctacaaagttgcctcagaaggcttccagtactccgacagaaggtggtgctttgatggggaaaggaacaaccaggtgttggaggagaacatggacgtggagatctggacaaaagaaggagaaagaaagaaactacgaccccgctggctggatgccagaacatactctgacccactggctctgcgcgaattcaaagagttcgcagcaggaagaagaagcgtctcaggtgacctaatattagaaatagggaaacttccacaacatttaacgcaaagggcccagaacgccttggacaatctggttatgttgcacaactctgaacaaggaggaaaagcctatagacacgccatggaagaactaccagacaccatagaaacgttaatgctcctagctttgatagctgtgctgactggtggagtgacgttgttcttcctatcaggaaggggtctaggaaaaacatccattggcctactctgcgtgattgcctcaagcgcactgctatggatggccagtgtggaaccccattggatagcggcctctatcatactggagttctttctgatggtgttgcttattccagagccggacagacagcgcactccacaagacaaccagctagcatacgtggtgataggtctgttattcatgatattgacagcggcagccaatgagatgggattactggaaaccacaaagaaggacctggggattggtcatgcagctgctgaaaaccaccatcatgctgcaatgctggacgtagacctacatccagcttcagcctggactctctatgcagtggccacaacaattatcactcccatgatgagacacacaattgaaaacacaacggcaaatatttccctgacagctattgcaaaccaggcagctatattgatgggacttgacaagggatggccaatatcaaagatggacataggagttccacttctcgccttggggtgctattctcaggtgaacccgctgacgctgacagcggcggtatttatgctagtggctcattatgccataattggacccggactgcaagcaaaagctactagagaagctcaaaaaaggacagcagccggaataatgaaaaacccaactgtcgacgggatcgttgcaatagatttggaccctgtggtttacgatgcaaaatttgaaaaacagctaggccaaataatgttgttgatactttgcacatcacagatcctcctgatgcggaccacatgggccttgtgtgaatccatcacactagccactggacctctgactacgctttgggagggatctccaggaaaattctggaacaccacgatagcggtgtccatggcaaacatttttaggggaagttatctagcaggagcaggtctggccttttcattaatgaaatctctaggaggaggtaggagaggcacgggagcccaaggggaaacactgggagaaaaatggaaaagacagctaaaccaattgagcaagtcagaattcaacacttacaaaaggagtgggattatagaggtggatagatctgaagccaaagaggggttaaaaagaggagaaccgactaaacacgcagtgtcgagaggaacggccaaactgaggtggtttgtggagaggaaccttgtgaaaccagaagggaaagtcatagacctcggttgtggaagaggtggctggtcatattattgcgctgggctgaagaaagtcacagaagtgaaaggatacacgaaaggaggacctggacatgaggaaccaatcccaatggcaacctatggatggaacctagtaaagctatactccgggaaagatgtattctttacaccacctgagaaatgtgacaccctcttgtgtgatattggtgagtcctctccgaacccaactatagaagaaggaagaacgttacgtgttctaaagatggtggaaccatggctcagaggaaaccaattttgcataaaaattctaaatccctatatgccgagtgtggtagaaactttggagcaaatgcaaagaaaacatggaggaatgctagtgcgaaatccactctcaagaaactccactcatgaaatgtactgggtttcatgtggaacaggaaacattgtgtcagcagtaaacatgacatctagaatgttgctaaatcgattcacaatggctcacaggaagccaacatatgaaagagacgtggacttaggcgctggaacaagacatgtggcagtagaaccagaggtggccaacctagatatcattggccagaggatagagaatataaaaaatggacacaaatcaacatggcactatgatgaggacaatccatacaaaacatgggcctatcatggatcatatgaggtcaagccatcaggatcagcctcatccatggtcaatggtgtggtgagactgctaaccaaaccatgggatgtcattcccatggtcacacaaatagccatgactgacaccacaccctttggacaacagagggtgtttaaagagaaagttgacacgcgtacaccaaaagcgaaacgaggcacagcacaaattatggaggtgacagccaggtggttatggggttttctctctagaaacaaaaaacccagaatctgcacaagagaggagttcacaagaaaagtcaggtcaaacgcagctattggagcagtgttcgttgatgaaaatcaatggaactcagcaaaagaggcagtggaagatgaacggttctgggaccttgtgcacagagagagggagcttcataaacaaggaaaatgtgccacgtgtgtctacaacatgatgggaaagagagagaaaaaattaggagagttcggaaaggcaaaaggaagtcgcgcaatatggtacatgtggttgggagcgcgctttttagagtttgaagcccttggtttcatgaatgaagatcactggttcagcagagagaattcactcagtggagtggaaggagaaggactccacaaacttggatacatactcagagacatatcaaagattccagggggaaatatgtatgcagatgacacagccggatgggacacaagaataacagaggatgatcttcagaatgaggccaaaatcactgacatcatggaacctgaacatgccctattggccacgtcaatctttaagctaacctaccaaaacaaggtagtaagggtgcagagaccagcgaaaaatggaaccgtgatggatgtcatatccagacgtgaccagagaggaagtggacaggttggaacctatggcttaaacaccttcaccaacatggaggcccaactaataagacaaatggagtctgagggaatcttttcacccagcgaattggaaaccccaaatctagccgaaagagtcctcgactggttgaaaaaacatggcaccgagaggctgaaaagaatggcaatcagtggagatgactgtgtggtgaaaccaatcgatgacagatttgcaacagccttaacagctttgaatgacatgggaaaggtaagaaaagacataccgcaatgggaaccttcaaaaggatggaatgattggcaacaagtgcctttctgttcacaccatttccaccagctgattatgaaggatgggagggagatagtggtgccatgccgcaaccaagatgaacttgtaggtagggccagagtatcacaaggcgccggatggagcttgagagaaactgcatgcctaggcaagtcatatgcacaaatgtggcagctgatgtacttccacaggagagacttgagattagcggctaatgctatctgttcagccgttccagttgattgggtcccaaccagccgtaccacctggtcgatccatgcccaccatcaatggatgacaacagaagacatgttgtcagtgtggaatagggtttggatagaggaaaacccatggatggaggacaagactcatgtgtccagttgggaagacgttccatacctaggaaaaagggaagatcgatggtgtggatccctaataggcttaacagcacgagccacctgggccaccaacatacaagtggccataaaccaagtgagaaggctcattgggaatgagaattatctagacttcatgacatcaatgaagagattcaaaaacgagagtgatcccgaaggggcactctggtaagccaactcattcacaaaataaaggaaaataaaaaatcaaacaaggcaagaagtcaggccggattaagccatagcacggtaagagctatgctgcctgtgagccccgtccaaggacgtaaaatgaagtcaggccgaaagccacggttcgagcaagccgtgctgcctgtagctccatcgtggggatgtaaaaacccgggaggctgcaaaccatggaagctgtacgcatggggtagcagactagtggttagaggagacccctcccaagacacaacgcagcagcggggcccaacaccaggggaagctgtaccctggtggtaaggactagaggttagaggagaccccccgcacaacaacaaacagcatattgacgctgggagagaccagagatcctgctgtctctacagcatcattccaggcacagaacgccaaaaaatggaatggtgctgttgaatcaacaggttct

SEQ ID NO: 91 - DNA, 10735 bp, Artificial
  DENV-1 WestPac74-EDE Null-Core-Viral Genome
agttgttagtctacgtggaccgacaagaacagtttcgaatcggaagcttgcttaacgtagttctaacagttttttattagagagcagatctctgatgaacaaccaacggaaaaagacgggtcgaccgtctttcaatatgctgaaacgcgcgagaaaccgcgtgtcaactgtttcacagttggcgaagagattctcaaaaggattgctttcaggccaaggacccatgaaattggtgatggcttttatagcattcctaagatttctagccatacctccaacagcaggaattttggctagatggggctcattcaagaagaatggagcgatcaaagtgttacggggtttcaagaaagaaatctcaaacatgttgaacataatgaacaggaggaaaagatctgtgaccatgctcctcatgctgctgcccacagccctggcgttccatctgaccacccgagggggagagccgcacatgatagttagcaagcaggaaagaggaaaatcacttttgtttaagacctctgcaggtgtcaacatgtgcacccttattgcaatggatttgggagagttatgtgaggacacaatgacctacaaatgcccccggatcactgagacggaaccagatgacgttgactgttggtgcaatgccacggagacatgggtgacctatggaacatgttctcaaactggtgaacaccgacgagacaaacgttccgtcgcactggcaccacacgtagggcttggtctagaaacaagaaccgaaacgtggatgtcctctgaaggcgcttggaaacaaatacaaaaagtggagacctgggctctgagacacccaggattcacggtgatagccctttttctagcacatgccataggaacatccatcacccagaaagggatcatttttattttgctgatgctggtaactccatccatggccatgcggtgcgtgggaataggcaacagagacttcgtggaaggactgtcaggagctacgtgggtggatgtggtactggagcatggaagttgcgtcactaccatggcaaaagacaaaccaacactggacattgaactcttgaagacggaggtcacaaaccctgccgtcctgcgcaaactgtgcattgaagctaaaatatcaaacaccgagacccgagctaagtgtccaacacaaggagaagccacgctggtggaagaacaggacacgaactttgtgtgtcgacgaacgttcgtggacagaggctgggattcaggttgtgggctattcggaaaaggtagcttaataacgtgtgctaagtttaagtgtgtgacaaaactggaaggaaagatagtccaatatgaaaacttaaaatattcagtgatagtcaccgtacacactggagaccagcaccaagttggaaatgagaccacagaacatggaacaattgcaaccataacacctcaagctcccacgtcggaaatacagctgacagactacggagctctaacattggattgttcacctagaacagggctagactttaatgagatggtgttgttgacaatgaaaaaaaaatcatggctcgtccacaaacaatggtttctagacttaccactgccttggacctcgggggcttcaacatcccaagagacttggaatagacaagacttgctggtcacatttaagacagctcatgcaacttacatccctgtagtcgtactaggatcacaagaaggagcaatgcacactgcgttgactggagcgacagaaatccaaacgtctggaacgacaacaatttttgcaggacacctgaaatgcagactaaaaatggataaactgactttaaaagggatgtcatatgtaatgtgcacagggtcattcaagttagagaaggaagtggctgagacccagcatggaactgttctagtgcaggttaaatacgaaggaacagatgcaccatgcaagatccccttctcgtcccaagatgagaagggagtaacccagaatgggagattgataacagccaaccccatagtcactgacaaagaaaaaccagtcaacattgaagcggagccaccttttggtgagagctacattgtggtaggagcaggtgaaaaagctttgaaactaagctggttcaagaagggaagcagtatagggaaaatgtttgaagcaactgcccgtggagcacgaaggatggccatcctgggagacactgcatgggacttcggttctataggaggggtgttcacgtctgtgggaaaactgatacaccagatttttgggactgcgtatggagttttgttcagcggtgtttcttggaccatgaagataggaatagggattctgctgacatggctaggattaaactcaaggagcacgtccctttcaatgacgtgtatcgcagttggcatggtcacgctgtacctaggagtcatggttcaggcggactcgggatgtgtaatcaactggaaaggcagagaactcaaatgtggaagcggcatttttgtcaccaatgaagtccacacctggacagagcaatataaattccaggccgactcccctaagagactatcagcggccattgggaaggcatgggaggagggtgtgtgtggaattcgatcagccactcgtctcgagaacatcatgtggaagcaaatatcaaatgaattaaaccacatcttacttgaaaatgacatgaaatttacagtggtcgtaggagacgttagtggaatcttggcccaaggaaagaaaatgattaggccacaacccatggaacacaaatactcgtggaaaagctggggaaaagccaaaatcataggagcagatgtacagaataccaccttcatcatcgacggcccaaacaccccagaatgccctgataaccaaagagcatggaacatttgggaagttgaagactatggatttggaattttcacgacaaacatatggttgaaattgcgtgactcctacactcaagtgtgtgaccaccggctaatgtcagctgccatcaaggatagcaaagcagtccatgctgacatggggtattggatagaaagtgaaaagaacgagacttggaagttggcaagagcctccttcatagaagttaagacatgcatctggccaaaatcccacactctatggagcaatggagtcctggaaagtgagatgataatcccaaagatatatggaggaccaatatctcagcacaactacagaccaggatatttcacacaaacagcagggccgtggcacttgggcaagttagaactagattttgatttatgtgaaggtaccactgttgttgtggatgaacattgtggaaatcgaggaccatctcttagaaccacaacagtcacaggaaagacaatccatgaatggtgctgtagatcttgcacgttaccccccctacgtttcaaaggagaagacgggtgctggtacggcatggaaatcagaccagtcaaggagaaggaagagaacctagttaagtcaatggtctctgcagggtcaggagaagtggacagtttttcactaggactgctatgcatatcaataatgatcgaagaggtaatgagatccagatggagcagaaaaatgctgatgactggaacattggctgtgttcctccttctcacaatgggacaattgacatggaatgatctgatcaggctatgtatcatggttggagccaacgcttcagacaagatggggatgggaacaacgtacctagctttgatggccactttcagaatgagaccaatgttcgcagtcgggctactgtttcgcagattaacatctagagaagttcttcttcttacagttggattgagtctggtggcatctgtagaactaccaaattccttagaggagctaggggatggacttgcaatgggcatcatgatgttgaaattactgactgattttcagtcacatcagctatgggctaccttgctgtctttaacatttgtcaaaacaactttttcattgcactatgcatggaagacaatggctatgatactgtcaattgtatctctcttccctttatgcctgtccacgacttctcaaaaaacaacatggcttccggtgttgctgggatctcttggatgcaaaccactaaccatgtttcttataacagaaaacaaaatctggggaaggaaaagctggcctctcaatgaaggaattatggctgttggaatagttagcattcttctaagttcacttctcaagaatgatgtgccactagctggcccactaatagctggaggcatgctaatagcatgttatgtcatatctggaagctcggccgatttatcactggagaaagcggctgaggtctcctgggaagaagaagcagaacactctggtgcctcacacaacatactagtggaggtccaagatgatggaaccatgaagataaaggatgaagagagagatgacacactcaccattctcctcaaagcaactctgctagcaatctcaggggtatacccaatgtcaataccggcgaccctctttgtgtggtatttttggcagaaaaagaaacagagatcaggagtgctatgggacacacccagccctccagaagtggaaagagcagtccttgatgatggcatttatagaattctccaaagaggattgttgggcaggtctcaagtaggagtaggagtttttcaagaaggcgtgttccacacaatgtggcacgtcaccaggggagctgtcctcatgtaccaagggaagagactggaaccaagttgggccagtgtcaaaaaagacttgatctcatatggaggaggttggaggtttcaaggatcctggaacgcgggagaagaagtgcaggtgattgctgttgaaccggggaagaaccccaaaaatgtacagacagcgccgggtaccttcaagacccctgaaggcgaagttggagccatagctctagactttaaacccggcacatctggatctcctatcgtgaacagagagggaaaaatagtaggtctttatggaaatggagtggtgacaacaagtggtacctacgtcagcgccatagctcaagctaaagcatcacaagaagggcctctaccagagattgaggacgaggtgtttaggaaaagaaacttaacaataatggacctacatccaggatcggggaaaacaagaagatatcttccagccatagtccgtgaggccataagaaggaacgtgcgcacgctagtcttagctcccacaagagttgtcgcttctgaaatggcagaggcgctcaagggaatgccaataaggtatcagacaacagcagtgaagagtgaacacacaggaaaagagatagttgaccttatgtgtcacgccactttcactatgcgtctcctgtctcctgtgagagttcccaattataatatgattatcatggatgaagcacatttcaccgatccagccagcatagcagccagagggtatatctcaacccgagtgggtatgggtgaagcagctgcgattttcatgacagccactccccccggatcggtggaggcctttccacagagcaatgcagttatccaagatgaggaaagagacattcctgaaagatcatggaactcaggctatgactggatcactgatttcccaggtaaaacagtctggtttgttccaagcatcaaatcaggaaatgacattgccaactgtttaagaaagaatgggaaacgggtggtccaattgagcagaaaaacttttgacactgagtaccagaaaacaaaaaataacgactgggactatgttgtcacaacagacatatccgaaatgggagcaaacttccgagccgacagggtaatagacccgaggcggtgcctgaaaccggtaatactaaaagatggcccagagcgtgtcattctagccggaccgatgccagtgactgtggctagcgccgcccagaggagaggaagaattggaaggaaccaaaataaggaaggcgatcagtatatttacatgggacagcctctaaacaatgatgaggaccacgcccattggacagaagcaaaaatgctccttgacaacataaacacaccagaagggattatcccagccctctttgagccggagagagaaaagagtgcagcaatagacggggaatacagactacggggtgaagcgaggaaaacgttcgtggagctcatgagaagaggagatctacctgtctggctatcctacaaagttgcctcagaaggcttccagtactccgacagaaggtggtgctttgatggggaaaggaacaaccaggtgttggaggagaacatggacgtggagatctggacaaaagaaggagaaagaaagaaactacgaccccgctggctggatgccagaacatactctgacccactggctctgcgcgaattcaaagagttcgcagcaggaagaagaagcgtctcaggtgacctaatattagaaatagggaaacttccacaacatttaacgcaaagggcccagaacgccttggacaatctggttatgttgcacaactctgaacaaggaggaaaagcctatagacacgccatggaagaactaccagacaccatagaaacgttaatgctcctagctttgatagctgtgctgactggtggagtgacgttgttcttcctatcaggaaggggtctaggaaaaacatccattggcctactctgcgtgattgcctcaagcgcactgctatggatggccagtgtggaaccccattggatagcggcctctatcatactggagttctttctgatggtgttgcttattccagagccggacagacagcgcactccacaagacaaccagctagcatacgtggtgataggtctgttattcatgatattgacagcggcagccaatgagatgggattactggaaaccacaaagaaggacctggggattggtcatgcagctgctgaaaaccaccatcatgctgcaatgctggacgtagacctacatccagcttcagcctggactctctatgcagtggccacaacaattatcactcccatgatgagacacacaattgaaaacacaacggcaaatatttccctgacagctattgcaaaccaggcagctatattgatgggacttgacaagggatggccaatatcaaagatggacataggagttccacttctcgccttggggtgctattctcaggtgaacccgctgacgctgacagcggcggtatttatgctagtggctcattatgccataattggacccggactgcaagcaaaagctactagagaagctcaaaaaaggacagcagccggaataatgaaaaacccaactgtcgacgggatcgttgcaatagatttggaccctgtggtttacgatgcaaaatttgaaaaacagctaggccaaataatgttgttgatactttgcacatcacagatcctcctgatgcggaccacatgggccttgtgtgaatccatcacactagccactggacctctgactacgctttgggagggatctccaggaaaattctggaacaccacgatagcggtgtccatggcaaacatttttaggggaagttatctagcaggagcaggtctggccttttcattaatgaaatctctaggaggaggtaggagaggcacgggagcccaaggggaaacactgggagaaaaatggaaaagacagctaaaccaattgagcaagtcagaattcaacacttacaaaaggagtgggattatagaggtggatagatctgaagccaaagaggggttaaaaagaggagaaccgactaaacacgcagtgtcgagaggaacggccaaactgaggtggtttgtggagaggaaccttgtgaaaccagaagggaaagtcatagacctcggttgtggaagaggtggctggtcatattattgcgctgggctgaagaaagtcacagaagtgaaaggatacacgaaaggaggacctggacatgaggaaccaatcccaatggcaacctatggatggaacctagtaaagctatactccgggaaagatgtattctttacaccacctgagaaatgtgacaccctcttgtgtgatattggtgagtcctctccgaacccaactatagaagaaggaagaacgttacgtgttctaaagatggtggaaccatggctcagaggaaaccaattttgcataaaaattctaaatccctatatgccgagtgtggtagaaactttggagcaaatgcaaagaaaacatggaggaatgctagtgcgaaatccactctcaagaaactccactcatgaaatgtactgggtttcatgtggaacaggaaacattgtgtcagcagtaaacatgacatctagaatgttgctaaatcgattcacaatggctcacaggaagccaacatatgaaagagacgtggacttaggcgctggaacaagacatgtggcagtagaaccagaggtggccaacctagatatcattggccagaggatagagaatataaaaaatggacacaaatcaacatggcactatgatgaggacaatccatacaaaacatgggcctatcatggatcatatgaggtcaagccatcaggatcagcctcatccatggtcaatggtgtggtgagactgctaaccaaaccatgggatgtcattcccatggtcacacaaatagccatgactgacaccacaccctttggacaacagagggtgtttaaagagaaagttgacacgcgtacaccaaaagcgaaacgaggcacagcacaaattatggaggtgacagccaggtggttatggggttttctctctagaaacaaaaaacccagaatctgcacaagagaggagttcacaagaaaagtcaggtcaaacgcagctattggagcagtgttcgttgatgaaaatcaatggaactcagcaaaagaggcagtggaagatgaacggttctgggaccttgtgcacagagagagggagcttcataaacaaggaaaatgtgccacgtgtgtctacaacatgatgggaaagagagagaaaaaattaggagagttcggaaaggcaaaaggaagtcgcgcaatatggtacatgtggttgggagcgcgctttttagagtttgaagcccttggtttcatgaatgaagatcactggttcagcagagagaattcactcagtggagtggaaggagaaggactccacaaacttggatacatactcagagacatatcaaagattccagggggaaatatgtatgcagatgacacagccggatgggacacaagaataacagaggatgatcttcagaatgaggccaaaatcactgacatcatggaacctgaacatgccctattggccacgtcaatctttaagctaacctaccaaaacaaggtagtaagggtgcagagaccagcgaaaaatggaaccgtgatggatgtcatatccagacgtgaccagagaggaagtggacaggttggaacctatggcttaaacaccttcaccaacatggaggcccaactaataagacaaatggagtctgagggaatcttttcacccagcgaattggaaaccccaaatctagccgaaagagtcctcgactggttgaaaaaacatggcaccgagaggctgaaaagaatggcaatcagtggagatgactgtgtggtgaaaccaatcgatgacagatttgcaacagccttaacagctttgaatgacatgggaaaggtaagaaaagacataccgcaatgggaaccttcaaaaggatggaatgattggcaacaagtgcctttctgttcacaccatttccaccagctgattatgaaggatgggagggagatagtggtgccatgccgcaaccaagatgaacttgtaggtagggccagagtatcacaaggcgccggatggagcttgagagaaactgcatgcctaggcaagtcatatgcacaaatgtggcagctgatgtacttccacaggagagacttgagattagcggctaatgctatctgttcagccgttccagttgattgggtcccaaccagccgtaccacctggtcgatccatgcccaccatcaatggatgacaacagaagacatgttgtcagtgtggaatagggtttggatagaggaaaacccatggatggaggacaagactcatgtgtccagttgggaagacgttccatacctaggaaaaagggaagatcgatggtgtggatccctaataggcttaacagcacgagccacctgggccaccaacatacaagtggccataaaccaagtgagaaggctcattgggaatgagaattatctagacttcatgacatcaatgaagagattcaaaaacgagagtgatcccgaaggggcactctggtaagccaactcattcacaaaataaaggaaaataaaaaatcaaacaaggcaagaagtcaggccggattaagccatagcacggtaagagctatgctgcctgtgagccccgtccaaggacgtaaaatgaagtcaggccgaaagccacggttcgagcaagccgtgctgcctgtagctccatcgtggggatgtaaaaacccgggaggctgcaaaccatggaagctgtacgcatggggtagcagactagtggttagaggagacccctcccaagacacaacgcagcagcggggcccaacaccaggggaagctgtaccctggtggtaaggactagaggttagaggagaccccccgcacaacaacaaacagcatattgacgctgggagagaccagagatcctgctgtctctacagcatcattccaggcacagaacgccaaaaaatggaatggtgctgttgaatcaacaggttct

SEQ ID NO: 92 - DNA, 10735 bp, Artificial
  DENV-1 WestPac74-EDE Null-Core and EDE1-Specific-Viral Genome
agttgttagtctacgtggaccgacaagaacagtttcgaatcggaagcttgcttaacgtagttctaacagttttttattagagagcagatctctgatgaacaaccaacggaaaaagacgggtcgaccgtctttcaatatgctgaaacgcgcgagaaaccgcgtgtcaactgtttcacagttggcgaagagattctcaaaaggattgctttcaggccaaggacccatgaaattggtgatggcttttatagcattcctaagatttctagccatacctccaacagcaggaattttggctagatggggctcattcaagaagaatggagcgatcaaagtgttacggggtttcaagaaagaaatctcaaacatgttgaacataatgaacaggaggaaaagatctgtgaccatgctcctcatgctgctgcccacagccctggcgttccatctgaccacccgagggggagagccgcacatgatagttagcaagcaggaaagaggaaaatcacttttgtttaagacctctgcaggtgtcaacatgtgcacccttattgcaatggatttgggagagttatgtgaggacacaatgacctacaaatgcccccggatcactgagacggaaccagatgacgttgactgttggtgcaatgccacggagacatgggtgacctatggaacatgttctcaaactggtgaacaccgacgagacaaacgttccgtcgcactggcaccacacgtagggcttggtctagaaacaagaaccgaaacgtggatgtcctctgaaggcgcttggaaacaaatacaaaaagtggagacctgggctctgagacacccaggattcacggtgatagccctttttctagcacatgccataggaacatccatcacccagaaagggatcatttttattttgctgatgctggtaactccatccatggccatgcattgcgtgggaataggcaacagagacttcgtggaaggactgtcaggagctacgtgggtggatgtggtactggagcatgacagttgcgtcactaccatggcaaaagacaaaccaacactggacattactgtattgaagacggaggtcacaaaccctgccgtcctgcgcaaactgtgcattgaagctaaaatatcaaacaccgagacccgagctaagtgtccaacagccggagaagccacgatcgtggaagaacaggacacgaactttgtgtgtcgacgaacgttcgtggacagaggctgggattcaggttgtttcctattcggaaaaggtagcttaataacgtgtgctaagtttaagtgtgtgacaaaactggaaggaaagatagtccaatatgaaaacttaaaatattcagtgatagtcaccgtacacactggagacaaccacaaggttggaaatgagaccacagaaaagggaacaattgcaaccataacacctcaagctcccacgtcggaaatacagctgacagactacggagctctaacattggattgttcacctagaacagggctagactttaatgagatggtgttgttgacaatgaaaaaaaaatcatggctcgtccacaaacaatggtttctagacttaccactgccttggacctcgggggcttcaacatcccaagagacttggaatagacaagacttgctggtcacatttaagacagctcatgcaacttacatccctgtagtcgtactaggatcacaagaaggagcaatgcacactgcgttgactggagcgacagaaatcaagacgtctggaacgacaacaatttttgcaggacacctgaaatgcagactaaaaatggataaactgactttaaaagggatgtcatatgtaatgtgcacagggtcattcaagttagagtctggtgtggctgagacccagcatggaactgttctagtgctcgttggttacgaaggaacagatgcaccatgcaagatccccttctcgtcccaagatgagaagggagtaacccagaatgggagattgataacagccaaccccatagtcactgacaaagaaaaaccagtcaacattgaagcggagccaccttttggtgagagctacattgtggtaggagcaggtgaaaaagctttgaaactaagctggttcaagaagggaagcagtatagggaaaatgtttgaagcaactgcccgtggagcacgaaggatggccatcctgggagacactgcatgggacttcggttctataggaggggtgttcacgtctgtgggaaaactgatacaccagatttttgggactgcgtatggagttttgttcagcggtgtttcttggaccatgaagataggaatagggattctgctgacatggctaggattaaactcaaggagcacgtccctttcaatgacgtgtatcgcagttggcatggtcacgctgtacctaggagtcatggttcaggcggactcgggatgtgtaatcaactggaaaggcagagaactcaaatgtggaagcggcatttttgtcaccaatgaagtccacacctggacagagcaatataaattccaggccgactcccctaagagactatcagcggccattgggaaggcatgggaggagggtgtgtgtggaattcgatcagccactcgtctcgagaacatcatgtggaagcaaatatcaaatgaattaaaccacatcttacttgaaaatgacatgaaatttacagtggtcgtaggagacgttagtggaatcttggcccaaggaaagaaaatgattaggccacaacccatggaacacaaatactcgtggaaaagctggggaaaagccaaaatcataggagcagatgtacagaataccaccttcatcatcgacggcccaaacaccccagaatgccctgataaccaaagagcatggaacatttgggaagttgaagactatggatttggaattttcacgacaaacatatggttgaaattgcgtgactcctacactcaagtgtgtgaccaccggctaatgtcagctgccatcaaggatagcaaagcagtccatgctgacatggggtattggatagaaagtgaaaagaacgagacttggaagttggcaagagcctccttcatagaagttaagacatgcatctggccaaaatcccacactctatggagcaatggagtcctggaaagtgagatgataatcccaaagatatatggaggaccaatatctcagcacaactacagaccaggatatttcacacaaacagcagggccgtggcacttgggcaagttagaactagattttgatttatgtgaaggtaccactgttgttgtggatgaacattgtggaaatcgaggaccatctcttagaaccacaacagtcacaggaaagacaatccatgaatggtgctgtagatcttgcacgttaccccccctacgtttcaaaggagaagacgggtgctggtacggcatggaaatcagaccagtcaaggagaaggaagagaacctagttaagtcaatggtctctgcagggtcaggagaagtggacagtttttcactaggactgctatgcatatcaataatgatcgaagaggtaatgagatccagatggagcagaaaaatgctgatgactggaacattggctgtgttcctccttctcacaatgggacaattgacatggaatgatctgatcaggctatgtatcatggttggagccaacgcttcagacaagatggggatgggaacaacgtacctagctttgatggccactttcagaatgagaccaatgttcgcagtcgggctactgtttcgcagattaacatctagagaagttcttcttcttacagttggattgagtctggtggcatctgtagaactaccaaattccttagaggagctaggggatggacttgcaatgggcatcatgatgttgaaattactgactgattttcagtcacatcagctatgggctaccttgctgtctttaacatttgtcaaaacaactttttcattgcactatgcatggaagacaatggctatgatactgtcaattgtatctctcttccctttatgcctgtccacgacttctcaaaaaacaacatggcttccggtgttgctgggatctcttggatgcaaaccactaaccatgtttcttataacagaaaacaaaatctggggaaggaaaagctggcctctcaatgaaggaattatggctgttggaatagttagcattcttctaagttcacttctcaagaatgatgtgccactagctggcccactaatagctggaggcatgctaatagcatgttatgtcatatctggaagctcggccgatttatcactggagaaagcggctgaggtctcctgggaagaagaagcagaacactctggtgcctcacacaacatactagtggaggtccaagatgatggaaccatgaagataaaggatgaagagagagatgacacactcaccattctcctcaaagcaactctgctagcaatctcaggggtatacccaatgtcaataccggcgaccctctttgtgtggtatttttggcagaaaaagaaacagagatcaggagtgctatgggacacacccagccctccagaagtggaaagagcagtccttgatgatggcatttatagaattctccaaagaggattgttgggcaggtctcaagtaggagtaggagtttttcaagaaggcgtgttccacacaatgtggcacgtcaccaggggagctgtcctcatgtaccaagggaagagactggaaccaagttgggccagtgtcaaaaaagacttgatctcatatggaggaggttggaggtttcaaggatcctggaacgcgggagaagaagtgcaggtgattgctgttgaaccggggaagaaccccaaaaatgtacagacagcgccgggtaccttcaagacccctgaaggcgaagttggagccatagctctagactttaaacccggcacatctggatctcctatcgtgaacagagagggaaaaatagtaggtctttatggaaatggagtggtgacaacaagtggtacctacgtcagcgccatagctcaagctaaagcatcacaagaagggcctctaccagagattgaggacgaggtgtttaggaaaagaaacttaacaataatggacctacatccaggatcggggaaaacaagaagatatcttccagccatagtccgtgaggccataagaaggaacgtgcgcacgctagtcttagctcccacaagagttgtcgcttctgaaatggcagaggcgctcaagggaatgccaataaggtatcagacaacagcagtgaagagtgaacacacaggaaaagagatagttgaccttatgtgtcacgccactttcactatgcgtctcctgtctcctgtgagagttcccaattataatatgattatcatggatgaagcacatttcaccgatccagccagcatagcagccagagggtatatctcaacccgagtgggtatgggtgaagcagctgcgattttcatgacagccactccccccggatcggtggaggcctttccacagagcaatgcagttatccaagatgaggaaagagacattcctgaaagatcatggaactcaggctatgactggatcactgatttcccaggtaaaacagtctggtttgttccaagcatcaaatcaggaaatgacattgccaactgtttaagaaagaatgggaaacgggtggtccaattgagcagaaaaacttttgacactgagtaccagaaaacaaaaaataacgactgggactatgttgtcacaacagacatatccgaaatgggagcaaacttccgagccgacagggtaatagacccgaggcggtgcctgaaaccggtaatactaaaagatggcccagagcgtgtcattctagccggaccgatgccagtgactgtggctagcgccgcccagaggagaggaagaattggaaggaaccaaaataaggaaggcgatcagtatatttacatgggacagcctctaaacaatgatgaggaccacgcccattggacagaagcaaaaatgctccttgacaacataaacacaccagaagggattatcccagccctctttgagccggagagagaaaagagtgcagcaatagacggggaatacagactacggggtgaagcgaggaaaacgttcgtggagctcatgagaagaggagatctacctgtctggctatcctacaaagttgcctcagaaggcttccagtactccgacagaaggtggtgctttgatggggaaaggaacaaccaggtgttggaggagaacatggacgtggagatctggacaaaagaaggagaaagaaagaaactacgaccccgctggctggatgccagaacatactctgacccactggctctgcgcgaattcaaagagttcgcagcaggaagaagaagcgtctcaggtgacctaatattagaaatagggaaacttccacaacatttaacgcaaagggcccagaacgccttggacaatctggttatgttgcacaactctgaacaaggaggaaaagcctatagacacgccatggaagaactaccagacaccatagaaacgttaatgctcctagctttgatagctgtgctgactggtggagtgacgttgttcttcctatcaggaaggggtctaggaaaaacatccattggcctactctgcgtgattgcctcaagcgcactgctatggatggccagtgtggaaccccattggatagcggcctctatcatactggagttctttctgatggtgttgcttattccagagccggacagacagcgcactccacaagacaaccagctagcatacgtggtgataggtctgttattcatgatattgacagcggcagccaatgagatgggattactggaaaccacaaagaaggacctggggattggtcatgcagctgctgaaaaccaccatcatgctgcaatgctggacgtagacctacatccagcttcagcctggactctctatgcagtggccacaacaattatcactcccatgatgagacacacaattgaaaacacaacggcaaatatttccctgacagctattgcaaaccaggcagctatattgatgggacttgacaagggatggccaatatcaaagatggacataggagttccacttctcgccttggggtgctattctcaggtgaacccgctgacgctgacagcggcggtatttatgctagtggctcattatgccataattggacccggactgcaagcaaaagctactagagaagctcaaaaaaggacagcagccggaataatgaaaaacccaactgtcgacgggatcgttgcaatagatttggaccctgtggtttacgatgcaaaatttgaaaaacagctaggccaaataatgttgttgatactttgcacatcacagatcctcctgatgcggaccacatgggccttgtgtgaatccatcacactagccactggacctctgactacgctttgggagggatctccaggaaaattctggaacaccacgatagcggtgtccatggcaaacatttttaggggaagttatctagcaggagcaggtctggccttttcattaatgaaatctctaggaggaggtaggagaggcacgggagcccaaggggaaacactgggagaaaaatggaaaagacagctaaaccaattgagcaagtcagaattcaacacttacaaaaggagtgggattatagaggtggatagatctgaagccaaagaggggttaaaaagaggagaaccgactaaacacgcagtgtcgagaggaacggccaaactgaggtggtttgtggagaggaaccttgtgaaaccagaagggaaagtcatagacctcggttgtggaagaggtggctggtcatattattgcgctgggctgaagaaagtcacagaagtgaaaggatacacgaaaggaggacctggacatgaggaaccaatcccaatggcaacctatggatggaacctagtaaagctatactccgggaaagatgtattctttacaccacctgagaaatgtgacaccctcttgtgtgatattggtgagtcctctccgaacccaactatagaagaaggaagaacgttacgtgttctaaagatggtggaaccatggctcagaggaaaccaattttgcataaaaattctaaatccctatatgccgagtgtggtagaaactttggagcaaatgcaaagaaaacatggaggaatgctagtgcgaaatccactctcaagaaactccactcatgaaatgtactgggtttcatgtggaacaggaaacattgtgtcagcagtaaacatgacatctagaatgttgctaaatcgattcacaatggctcacaggaagccaacatatgaaagagacgtggacttaggcgctggaacaagacatgtggcagtagaaccagaggtggccaacctagatatcattggccagaggatagagaatataaaaaatggacacaaatcaacatggcactatgatgaggacaatccatacaaaacatgggcctatcatggatcatatgaggtcaagccatcaggatcagcctcatccatggtcaatggtgtggtgagactgctaaccaaaccatgggatgtcattcccatggtcacacaaatagccatgactgacaccacaccctttggacaacagagggtgtttaaagagaaagttgacacgcgtacaccaaaagcgaaacgaggcacagcacaaattatggaggtgacagccaggtggttatggggttttctctctagaaacaaaaaacccagaatctgcacaagagaggagttcacaagaaaagtcaggtcaaacgcagctattggagcagtgttcgttgatgaaaatcaatggaactcagcaaaagaggcagtggaagatgaacggttctgggaccttgtgcacagagagagggagcttcataaacaaggaaaatgtgccacgtgtgtctacaacatgatgggaaagagagagaaaaaattaggagagttcggaaaggcaaaaggaagtcgcgcaatatggtacatgtggttgggagcgcgctttttagagtttgaagcccttggtttcatgaatgaagatcactggttcagcagagagaattcactcagtggagtggaaggagaaggactccacaaacttggatacatactcagagacatatcaaagattccagggggaaatatgtatgcagatgacacagccggatgggacacaagaataacagaggatgatcttcagaatgaggccaaaatcactgacatcatggaacctgaacatgccctattggccacgtcaatctttaagctaacctaccaaaacaaggtagtaagggtgcagagaccagcgaaaaatggaaccgtgatggatgtcatatccagacgtgaccagagaggaagtggacaggttggaacctatggcttaaacaccttcaccaacatggaggcccaactaataagacaaatggagtctgagggaatcttttcacccagcgaattggaaaccccaaatctagccgaaagagtcctcgactggttgaaaaaacatggcaccgagaggctgaaaagaatggcaatcagtggagatgactgtgtggtgaaaccaatcgatgacagatttgcaacagccttaacagctttgaatgacatgggaaaggtaagaaaagacataccgcaatgggaaccttcaaaaggatggaatgattggcaacaagtgcctttctgttcacaccatttccaccagctgattatgaaggatgggagggagatagtggtgccatgccgcaaccaagatgaacttgtaggtagggccagagtatcacaaggcgccggatggagcttgagagaaactgcatgcctaggcaagtcatatgcacaaatgtggcagctgatgtacttccacaggagagacttgagattagcggctaatgctatctgttcagccgttccagttgattgggtcccaaccagccgtaccacctggtcgatccatgcccaccatcaatggatgacaacagaagacatgttgtcagtgtggaatagggtttggatagaggaaaacccatggatggaggacaagactcatgtgtccagttgggaagacgttccatacctaggaaaaagggaagatcgatggtgtggatccctaataggcttaacagcacgagccacctgggccaccaacatacaagtggccataaaccaagtgagaaggctcattgggaatgagaattatctagacttcatgacatcaatgaagagattcaaaaacgagagtgatcccgaaggggcactctggtaagccaactcattcacaaaataaaggaaaataaaaaatcaaacaaggcaagaagtcaggccggattaagccatagcacggtaagagctatgctgcctgtgagccccgtccaaggacgtaaaatgaagtcaggccgaaagccacggttcgagcaagccgtgctgcctgtagctccatcgtggggatgtaaaaacccgggaggctgcaaaccatggaagctgtacgcatggggtagcagactagtggttagaggagacccctcccaagacacaacgcagcagcggggcccaacaccaggggaagctgtaccctggtggtaaggactagaggttagaggagaccccccgcacaacaacaaacagcatattgacgctgggagagaccagagatcctgctgtctctacagcatcattccaggcacagaacgccaaaaaatggaatggtgctgttgaatcaacaggttct

SEQ ID NO: 93 - DNA, 10807 bp, Artificial
  ZIKV HPF2013-EDE Null-EDE1-Specific-Viral Genome
agttgttgatctgtgtgaatcagactgcgacagttcgagtttgaagcgaaagctagcaacagtatcaacaggttttattttggatttggaaacgagagtttctggtcatgaaaaacccaaaaaagaaatccggaggattccggattgtcaatatgctaaaacgcggagtagcccgtgtgagcccctttgggggcttgaagaggctgccagccggacttctgctgggtcatgggcccatcaggatggtcttggcgattctagcctttttgagattcacggcaatcaagccatcactgggtctcatcaatagatggggttcagtggggaaaaaagaggctatggaaataataaagaagttcaagaaagatctggctgccatgctgagaataatcaatgctaggaaggagaagaagagacgaggcgcagatactagtgtcggaattgttggcctcctgctgaccacagctatggcagcggaggtcactagacgtgggagtgcatactatatgtacttggacagaaacgacgctggggaggccatatcttttccaaccacattggggatgaataagtgttatatacagatcatggatcttggacacatgtgtgatgccaccatgagctatgaatgccctatgctggatgagggggtggaaccagatgacgtcgattgttggtgcaacacgacgtcaacttgggttgtgtacggaacctgccatcacaaaaaaggtgaagcacggagatctagaagagctgtgacgctcccctcccattccactaggaagctgcaaacgcggtcgcaaacctggttggaatcaagagaatacacaaagcacttgattagagtcgaaaattggatattcaggaaccctggcttcgcgttagcagcagctgccatcgcttggcttttgggaagctcaacgagccaaaaagtcatatacttggtcatgatactgctgattgccccggcatacagcatccattgcataggagtcagcaatagggactttgtggaaggtatgtcaggtgggacttgggttgatgttgtcttggaacatgatggttgtgtcaccgtaatggcacaggacaaaccgactgtcgacataactgtcgttacaacaacagtcagcaacatggcggaggtaagatcctactgctatgaggcatcaatatcggacatggcttcggacagccgctgcccaacagccggtgaagcctacatagacaagcaatcagacactcaatatgtctgcaaaagaacgttagtggacagaggctggggaaatggatgtttcctttttggcaaagggagcctggtgacatgcgctaagtttgcatgctccaagaaaatgaccgggaagagcatccagccagagaatctggagtaccggataatgctgtcagttcatggctcccagaatagtgggaaaatcgttaatgacacaggacatgaaactgatgagaagagagcgaaggttgagataacgcccaattcaccaagagccgaagccaccctggggggttttggaagcctaggacttgattgtgaaccgaggacaggccttgacttttcagatttgtattacttgactatgaataacaagcactggttggttcacaaggagtggttccacgacattccattaccttggcacgctggggcagacaccggaactccacactggaacaacaaagaagcactggtagagttcaaggacgcacatgccaaaaggcaaactgtcgtggttctagggagtcaagaaggagcagttcacacggcccttgctggagctctggaggctaaaatggatggtgcaaagggaaggctgtcctctggccacttgaaatgtcgcctgaaaatggataaacttagattgaagggcgtgtcatactccttgtgtaccgcagcgttcacattcacctctggaccggctgaaacactgcacgggacagtcacagtgttagtaggttacgcagggacagatggaccttgcaaggttccagctcagatggcggtggacatgcaaactctgaccccagttgggaggttgataaccgctaaccccgtaatcactgaaagcactgagaactctaagatgatgctggaacttgatccaccatttggggactcttacattgtcataggagtcggggagaagaagatcacccaccactggcacaggagtggcagcaccattggaaaagcatttgaagccactgtgagaggtgccaagagaatggcagtcttgggagacacagcctgggactttggatcagttggaggcgctctcaactcattgggcaagggcatccatcaaatttttggagcagctttcaaatcattgtttggaggaatgtcctggttctcacaaattctcattggaacgttgctgatgtggttgggtctgaacacaaagaatggatctatttcccttatgtgcttggccttagggggagtgttgatcttcttatccacagctgtctctgctgatgtggggtgctcggtggacttctcaaagaaggagacgagatgcggtacaggggtgttcgtctataacgacgttgaagcctggagggacaggtacaagtaccatcctgactccccccgtagattggcagcagcagtcaagcaagcctgggaagatggtatctgtgggatctcctctgtttcaagaatggaaaacatcatgtggagatcagtagaaggggagctcaacgcaatcctggaagagaatggagttcaactgacggtcgttgtgggatctgtaaaaaaccccatgtggagaggtccacagagattgcccgtgcctgtgaacgagctgccccacggctggaaggcttgggggaaatcgtacttcgtcagagcagcaaagacaaataacagctttgtcgtggatggtgacacactgaaggaatgcccactcaaacatagagcatggaacagctttcttgtggaggatcatgggttcggggtatttcacactagtgtctggctcaaggttagagaagattattcattagagtgtgatccagccgttattggaacagctgttaagggaaaggaggctgtacacagtgatctaggctactggattgagagtgagaagaatgacacatggaggctgaagagggcccatctgatcgagatgaaaacatgtgaatggccaaagtcccacacattgtggacagatggaatagaagagagtgatctgatcatacccaagtctttagctgggccactcagccatcacaataccagagagggctacaggacccaaatgaaagggccatggcacagtgaagagcttgaaattcggtttgaggaatgcccaggcactaaggtccacgtggaggaaacatgtggaacaagaggaccatctctgagatcaaccactgcaagcggaagggtgatcgaggaatggtgctgcagggagtgcacaatgcccccactgtcgttccgggctaaagatggctgttggtatggaatggagataaggcccaggaaagaaccagaaagtaacttagtaaggtcaatggtgactgcaggatcaactgatcacatggatcacttctcccttggagtgcttgtgattctgctcatggtgcaggaagggctgaagaagagaatgaccacaaagatcatcataagcacatcgatggcagtgctggtagctatgatcctgggaggattttcaatgagtgacctggctaagcttgcaattttgatgggtgccaccttcgcggaaatgaacactggaggagatgtagctcatctggcgctgatagcggcattcaaagtcagaccagcgttgctggtatctttcatcttcagagctaattggacaccccgtgaaagcatgctgctggccttggcctcgtgtcttttgcaaactgcgatctccgccttggaaggcgacctgatggttctcatcaatggttttgctttggcctggttggcaatacgagcgatggttgttccacgcactgataacatcaccttggcaatcctggctgctctgacaccactggcccggggcacactgcttgtggcgtggagagcaggccttgctacttgcggggggtttatgctcctctctctgaagggaaaaggcagtgtgaagaagaacttaccatttgtcatggccctgggactaaccgctgtgaggctggtcgaccccatcaacgtggtgggactgctgttgctcacaaggagtgggaagcggagctggccccctagcgaagtactcacagctgttggcctgatatgcgcattggctggagggttcgccaaggcagatatagagatggctgggcccatggccgcggtcggtctgctaattgtcagttacgtggtctcaggaaagagtgtggacatgtacattgaaagagcaggtgacatcacatgggaaaaagatgcggaagtcactggaaacagtccccggctcgatgtggcgctagatgagagtggtgatttctccctggtggaggatgacggtccccccatgagagagatcatactcaaggtggtcctgatgaccatctgtggcatgaacccaatagccataccctttgcagctggagcgtggtacgtatacgtgaagactggaaaaaggagtggtgctctatgggatgtgcctgctcccaaggaagtaaaaaagggggagaccacagatggagtgtacagagtaatgactcgtagactgctaggttcaacacaagttggagtgggagttatgcaagagggggtctttcacactatgtggcacgtcacaaaaggatccgcgctgagaagcggtgaagggagacttgatccatactggggagatgtcaagcaggatctggtgtcatactgtggtccatggaagctagatgccgcctgggacgggcacagcgaggtgcagctcttggccgtgccccccggagagagagcgaggaacatccagactctgcccggaatatttaagacaaaggatggggacattggagcggttgcgctggattacccagcaggaacttcaggatctccaatcctagacaagtgtgggagagtgataggactttatggcaatggggtcgtgatcaaaaatgggagttatgttagtgccatcacccaagggaggagggaggaagagactcctgttgagtgcttcgagccttcgatgctgaagaagaagcagctaactgtcttagacttgcatcctggagctgggaaaaccaggagagttcttcctgaaatagtccgtgaagccataaaaacaagactccgtactgtgatcttagctccaaccagggttgtcgctgctgaaatggaggaagcccttagagggcttccagtgcgttatatgacaacagcagtcaatgtcacccactctggaacagaaatcgtcgacttaatgtgccatgccaccttcacttcacgtctactacagccaatcagagtccccaactataatctgtatattatggatgaggcccacttcacagatccctcaagtatagcagcaagaggatacatttcaacaagggttgagatgggcgaggcggctgccatcttcatgaccgccacgccaccaggaacccgtgacgcatttccggactccaactcaccaattatggacaccgaagtggaagtcccagagagagcctggagctcaggctttgattgggtgacggatcattctggaaaaacagtttggtttgttccaagcgtgaggaacggcaatgagatcgcagcttgtctgacaaaggctggaaaacgggtcatacagctcagcagaaagacttttgagacagagttccagaaaacaaaacatcaagagtgggactttgtcgtgacaactgacatttcagagatgggcgccaactttaaagctgaccgtgtcatagattccaggagatgcctaaagccggtcatacttgatggcgagagagtcattctggctggacccatgcctgtcacacatgccagcgctgcccagaggagggggcgcataggcaggaatcccaacaaacctggagatgagtatctgtatggaggtgggtgcgcagagactgacgaagaccatgcacactggcttgaagcaagaatgctccttgacaatatttacctccaagatggcctcatagcctcgctctatcgacctgaggccgacaaagtagcagccattgagggagagttcaagcttaggacggagcaaaggaagacctttgtggaactcatgaaaagaggagatcttcctgtttggctggcctatcaggttgcatctgccggaataacctacacagatagaagatggtgctttgatggcacgaccaacaacaccataatggaagacagtgtgccggcagaggtgtggaccagacacggagagaaaagagtgctcaaaccgaggtggatggacgccagagtttgttcagatcatgcggccctgaagtcattcaaggagtttgccgctgggaaaagaggagcggcttttggagtgatggaagccctgggaacactgccaggacacatgacagagagattccaggaagccattgacaacctcgctgtgctcatgcgggcagagactggaagcaggccttacaaagccgcggcggcccaattgccggagaccctagagaccattatgcttttggggttgctgggaacagtctcgctgggaatctttttcgtcttgatgaggaacaagggcatagggaagatgggctttggaatggtgactcttggggccagcgcatggctcatgtggctctcggaaattgagccagccagaattgcatgtgtcctcattgttgtgttcctattgctggtggtgctcatacctgagccagaaaagcaaagatctccccaggacaaccaaatggcaatcatcatcatggtagcagtaggtcttctgggcttgattaccgccaatgaactcggatggttggagagaacaaagagtgacctaagccatctaatgggaaggagagaggagggggcaaccataggattctcaatggacattgacctgcggccagcctcagcttgggccatctatgctgccttgacaactttcattaccccagccgtccaacatgcagtgaccacttcatacaacaactactccttaatggcgatggccacgcaagctggagtgttgtttggtatgggcaaagggatgccattctacgcatgggactttggagtcccgctgctaatgataggttgctactcacaattaacacccctgaccctaatagtggccatcattttgctcgtggcgcactacatgtacttgatcccagggctgcaggcagcagctgcgcgtgctgcccagaagagaacggcagctggcatcatgaagaaccctgttgtggatggaatagtggtgactgacattgacacaatgacaattgacccccaagtggagaaaaagatgggacaggtgctactcatagcagtagccgtctccagcgccatactgtcgcggaccgcctgggggtggggggaggctggggccctgatcacagcggcaacttccactttgtgggaaggctctccgaacaagtactggaactcctctacagccacttcactgtgtaacatttttaggggaagttacttggctggagcttctctaatctacacagtaacaagaaacgctggcttggtcaagagacgtgggggtggaacaggagagaccctgggagagaaatggaaggcccgcttgaaccagatgtcggccctggagttctactcctacaaaaagtcaggcatcaccgaggtgtgcagagaagaggcccgccgcgccctcaaggacggtgtggcaacgggaggccatgctgtgtcccgaggaagtgcaaagctgagatggttggtggagcggggatacctgcagccctatggaaaggtcattgatcttggatgtggcagagggggctggagttactacgccgccaccatccgcaaagttcaagaagtgaaaggatacacaaaaggaggccctggtcatgaagaacccatgttggtgcaaagctatgggtggaacatagtccgtcttaagagtggggtggacgtctttcatatggcggctgagccgtgtgacacgttgctgtgtgacataggtgagtcatcatctagtcctgaagtggaagaagcacggacgctcagagtcctctccatggtgggggattggcttgaaaaaagaccaggagccttttgtataaaagtgttgtgcccatacaccagcactatgatggaaaccctggagcgactgcagcgtaggtatgggggaggactggtcagagtgccactctcccgcaactctacacatgagatgtactgggtctctggagcgaaaagcaacaccataaaaagtgtgtccaccacgagccagctcctcttggggcgcatggacgggcccaggaggccagtgaaatatgaggaggatgtgaatctcggctctggcacgcgggctgtggtaagctgcgctgaagctcccaacatgaagatcattggtaaccgcattgaaaggatccgcagtgagcacgcggaaacgtggttctttgacgagaaccacccatataggacatgggcttaccatggaagctatgaggcccccacacaagggtcagcgtcctctctaataaacggggttgtcaggctcctgtcaaaaccctgggatgtggtgactggagtcacaggaatagccatgaccgacaccacaccgtatggtcagcaaagagttttcaaggaaaaagtggacactagggtgccagacccccaagaaggcactcgtcaggttatgagcatggtctcttcctggttgtggaaagagctaggcaaacacaaacggccacgagtctgtaccaaagaagagttcatcaacaaggttcgtagcaatgcagcattaggggcaatatttgaagaggaaaaagagtggaagactgcagtggaagctgtgaacgatccaaggttctgggctctagtggacaaggaaagagagcaccacctgagaggagagtgccagagttgtgtgtacaacatgatgggaaaaagagaaaagaaacaaggggaatttggaaaggccaagggcagccgcgccatctggtatatgtggctaggggctagatttctagagttcgaagcccttggattcttgaacgaggatcactggatggggagagagaactcaggaggtggtgttgaagggctgggattacaaagactcggatatgtcctagaagagatgagtcgcataccaggaggaaggatgtatgcagatgacactgctggctgggacacccgcatcagcaggtttgatctggagaatgaagctctaatcaccaaccaaatggagaaagggcacagggccttggcattggccataatcaagtacacataccaaaacaaagtggtaaaggtccttagaccagctgaaaaagggaagacagttatggacattatttcgagacaagaccaaagggggagcggacaagttgtcacttacgctcttaacacatttaccaacctagtggtgcaactcattcggaatatggaggctgaggaagttctagagatgcaagacttgtggctgctgcggaggtcagagaaagtgaccaactggttgcagagcaacggatgggataggctcaaacgaatggcagtcagtggagatgattgcgttgtgaagccaattgatgataggtttgcacatgccctcaggttcttgaatgatatgggaaaagttaggaaggacacacaagagtggaaaccctcaactggatgggacaactgggaagaagttccgttttgctcccaccacttcaacaagctccatctcaaggacgggaggtccattgtggttccctgccgccaccaagatgaactgattggccgggcccgcgtctctccaggggcgggatggagcatccgggagactgcttgcctagcaaaatcatatgcgcaaatgtggcagctcctttatttccacagaagggacctccgactgatggccaatgccatttgttcatctgtgccagttgactgggttccaactgggagaactacctggtcaatccatggaaagggagaatggatgaccactgaagacatgcttgtggtgtggaacagagtgtggattgaggagaacgaccacatggaagacaagaccccagttacgaaatggacagacattccctatttgggaaaaagggaagacttgtggtgtggatctctcatagggcacagaccgcgcaccacctgggctgagaacattaaaaacacagtcaacatggtgcgcaggatcataggtgatgaagaaaagtacatggactacctatccacccaagttcgctacttgggtgaagaagggtctacacctggagtgctgtaagcaccaatcttagtgttgtcaggcctgctagtcagccacagcttggggaaagctgtgcagcctgtgacccccccaggagaagctgggaaaccaagcctatagtcaggccgagaacgccatggcacggaagaagccatgctgcctgtgagcccctcagaggacactgagtcaaaaaaccccacgcgcttggaggcgcaggatgggaaaagaaggtggcgaccttccccacccttcaatctggggcctgaactggagatcagctgtggatctccagaagagggactagtggttagaggagaccccccggaaaacgcaaaacagcatattgacgctgggaaagaccagagactccatgagtttccaccacgctggccgccaggcacagatcgccgaatagcggcggccggtgtggggaaatccatgggtct

SEQ ID NO: 94 - DNA, 10807 bp, Artificial
  ZIKV HPF2013-EDE Null-Core-Viral Genome
agttgttgatctgtgtgaatcagactgcgacagttcgagtttgaagcgaaagctagcaacagtatcaacaggttttattttggatttggaaacgagagtttctggtcatgaaaaacccaaaaaagaaatccggaggattccggattgtcaatatgctaaaacgcggagtagcccgtgtgagcccctttgggggcttgaagaggctgccagccggacttctgctgggtcatgggcccatcaggatggtcttggcgattctagcctttttgagattcacggcaatcaagccatcactgggtctcatcaatagatggggttcagtggggaaaaaagaggctatggaaataataaagaagttcaagaaagatctggctgccatgctgagaataatcaatgctaggaaggagaagaagagacgaggcgcagatactagtgtcggaattgttggcctcctgctgaccacagctatggcagcggaggtcactagacgtgggagtgcatactatatgtacttggacagaaacgacgctggggaggccatatcttttccaaccacattggggatgaataagtgttatatacagatcatggatcttggacacatgtgtgatgccaccatgagctatgaatgccctatgctggatgagggggtggaaccagatgacgtcgattgttggtgcaacacgacgtcaacttgggttgtgtacggaacctgccatcacaaaaaaggtgaagcacggagatctagaagagctgtgacgctcccctcccattccactaggaagctgcaaacgcggtcgcaaacctggttggaatcaagagaatacacaaagcacttgattagagtcgaaaattggatattcaggaaccctggcttcgcgttagcagcagctgccatcgcttggcttttgggaagctcaacgagccaaaaagtcatatacttggtcatgatactgctgattgccccggcatacagcatcaggtgcataggagtcagcaatagggactttgtggaaggtatgtcaggtgggacttgggttgatgttgtcttggaacatggaggttgtgtcaccgtaatggcacaggacaaaccgactgtcgacatagagctggttacaacaacagtcagcaacatggcggaggtaagatcctactgctatgaggcatcaatatcggacatggagtcgcgagcaaagtgcccaacacaaggtgaagcctaccttgacaagcaatcagacactcaatatgtctgcaaaagaacgttagtggacagaggctgggattcaggatgtggactttttggcaaagggagcctggtgacatgcgctaagtttgcatgctccaagaaaatgaccgggaagagcatccagccagagaatctggagtaccggataatgctgtcagttcatggctcccagcacagtgggatgatcgttaatgacacaggacatgaaactgatgagaatagagcgaaggttgagataacgcccaattcaccaagagccgaagccaccctggggggttttggaagcctaggacttgattgtgaaccgaggacaggccttgacttttcagatttgtattacttgactatgaataacaagcactggttggttcacaaggagtggttccacgacattccattaccttggcacgctggggcagacaccggaactccacactggaacaacaaagaagcactggtagagttcaaggacgcacatgccacttacatcccagtcgtggttctagggagtcaagaaggagcagttcacacggcccttgctggagctctggaggctgagatggatggtgcaaagggaaggctgtcctctggccacttgaaatgtcgcctgaaaatggataaacttagattgaagggcgtgtcatactccttgtgtaccgcagcgttcacattcaccaagatcccggctgaaacactgcacgggacagtcacagtggaggtacagtacgcagggacagatggaccttgcaaggttccagctcagatggcggtggacatgcaaactctgaccccagttgggaggttgataaccgctaaccccgtaatcactgaaagcactgagaactctaagatgatgctggaacttgatccaccatttggggactcttacattgtcataggagtcggggagaagaagatcacccaccactggcacaggagtggcagcaccattggaaaagcatttgaagccactgtgagaggtgccaagagaatggcagtcttgggagacacagcctgggactttggatcagttggaggcgctctcaactcattgggcaagggcatccatcaaatttttggagcagctttcaaatcattgtttggaggaatgtcctggttctcacaaattctcattggaacgttgctgatgtggttgggtctgaacacaaagaatggatctatttcccttatgtgcttggccttagggggagtgttgatcttcttatccacagctgtctctgctgatgtggggtgctcggtggacttctcaaagaaggagacgagatgcggtacaggggtgttcgtctataacgacgttgaagcctggagggacaggtacaagtaccatcctgactccccccgtagattggcagcagcagtcaagcaagcctgggaagatggtatctgtgggatctcctctgtttcaagaatggaaaacatcatgtggagatcagtagaaggggagctcaacgcaatcctggaagagaatggagttcaactgacggtcgttgtgggatctgtaaaaaaccccatgtggagaggtccacagagattgcccgtgcctgtgaacgagctgccccacggctggaaggcttgggggaaatcgtacttcgtcagagcagcaaagacaaataacagctttgtcgtggatggtgacacactgaaggaatgcccactcaaacatagagcatggaacagctttcttgtggaggatcatgggttcggggtatttcacactagtgtctggctcaaggttagagaagattattcattagagtgtgatccagccgttattggaacagctgttaagggaaaggaggctgtacacagtgatctaggctactggattgagagtgagaagaatgacacatggaggctgaagagggcccatctgatcgagatgaaaacatgtgaatggccaaagtcccacacattgtggacagatggaatagaagagagtgatctgatcatacccaagtctttagctgggccactcagccatcacaataccagagagggctacaggacccaaatgaaagggccatggcacagtgaagagcttgaaattcggtttgaggaatgcccaggcactaaggtccacgtggaggaaacatgtggaacaagaggaccatctctgagatcaaccactgcaagcggaagggtgatcgaggaatggtgctgcagggagtgcacaatgcccccactgtcgttccgggctaaagatggctgttggtatggaatggagataaggcccaggaaagaaccagaaagtaacttagtaaggtcaatggtgactgcaggatcaactgatcacatggatcacttctcccttggagtgcttgtgattctgctcatggtgcaggaagggctgaagaagagaatgaccacaaagatcatcataagcacatcgatggcagtgctggtagctatgatcctgggaggattttcaatgagtgacctggctaagcttgcaattttgatgggtgccaccttcgcggaaatgaacactggaggagatgtagctcatctggcgctgatagcggcattcaaagtcagaccagcgttgctggtatctttcatcttcagagctaattggacaccccgtgaaagcatgctgctggccttggcctcgtgtcttttgcaaactgcgatctccgccttggaaggcgacctgatggttctcatcaatggttttgctttggcctggttggcaatacgagcgatggttgttccacgcactgataacatcaccttggcaatcctggctgctctgacaccactggcccggggcacactgcttgtggcgtggagagcaggccttgctacttgcggggggtttatgctcctctctctgaagggaaaaggcagtgtgaagaagaacttaccatttgtcatggccctgggactaaccgctgtgaggctggtcgaccccatcaacgtggtgggactgctgttgctcacaaggagtgggaagcggagctggccccctagcgaagtactcacagctgttggcctgatatgcgcattggctggagggttcgccaaggcagatatagagatggctgggcccatggccgcggtcggtctgctaattgtcagttacgtggtctcaggaaagagtgtggacatgtacattgaaagagcaggtgacatcacatgggaaaaagatgcggaagtcactggaaacagtccccggctcgatgtggcgctagatgagagtggtgatttctccctggtggaggatgacggtccccccatgagagagatcatactcaaggtggtcctgatgaccatctgtggcatgaacccaatagccataccctttgcagctggagcgtggtacgtatacgtgaagactggaaaaaggagtggtgctctatgggatgtgcctgctcccaaggaagtaaaaaagggggagaccacagatggagtgtacagagtaatgactcgtagactgctaggttcaacacaagttggagtgggagttatgcaagagggggtctttcacactatgtggcacgtcacaaaaggatccgcgctgagaagcggtgaagggagacttgatccatactggggagatgtcaagcaggatctggtgtcatactgtggtccatggaagctagatgccgcctgggacgggcacagcgaggtgcagctcttggccgtgccccccggagagagagcgaggaacatccagactctgcccggaatatttaagacaaaggatggggacattggagcggttgcgctggattacccagcaggaacttcaggatctccaatcctagacaagtgtgggagagtgataggactttatggcaatggggtcgtgatcaaaaatgggagttatgttagtgccatcacccaagggaggagggaggaagagactcctgttgagtgcttcgagccttcgatgctgaagaagaagcagctaactgtcttagacttgcatcctggagctgggaaaaccaggagagttcttcctgaaatagtccgtgaagccataaaaacaagactccgtactgtgatcttagctccaaccagggttgtcgctgctgaaatggaggaagcccttagagggcttccagtgcgttatatgacaacagcagtcaatgtcacccactctggaacagaaatcgtcgacttaatgtgccatgccaccttcacttcacgtctactacagccaatcagagtccccaactataatctgtatattatggatgaggcccacttcacagatccctcaagtatagcagcaagaggatacatttcaacaagggttgagatgggcgaggcggctgccatcttcatgaccgccacgccaccaggaacccgtgacgcatttccggactccaactcaccaattatggacaccgaagtggaagtcccagagagagcctggagctcaggctttgattgggtgacggatcattctggaaaaacagtttggtttgttccaagcgtgaggaacggcaatgagatcgcagcttgtctgacaaaggctggaaaacgggtcatacagctcagcagaaagacttttgagacagagttccagaaaacaaaacatcaagagtgggactttgtcgtgacaactgacatttcagagatgggcgccaactttaaagctgaccgtgtcatagattccaggagatgcctaaagccggtcatacttgatggcgagagagtcattctggctggacccatgcctgtcacacatgccagcgctgcccagaggagggggcgcataggcaggaatcccaacaaacctggagatgagtatctgtatggaggtgggtgcgcagagactgacgaagaccatgcacactggcttgaagcaagaatgctccttgacaatatttacctccaagatggcctcatagcctcgctctatcgacctgaggccgacaaagtagcagccattgagggagagttcaagcttaggacggagcaaaggaagacctttgtggaactcatgaaaagaggagatcttcctgtttggctggcctatcaggttgcatctgccggaataacctacacagatagaagatggtgctttgatggcacgaccaacaacaccataatggaagacagtgtgccggcagaggtgtggaccagacacggagagaaaagagtgctcaaaccgaggtggatggacgccagagtttgttcagatcatgcggccctgaagtcattcaaggagtttgccgctgggaaaagaggagcggcttttggagtgatggaagccctgggaacactgccaggacacatgacagagagattccaggaagccattgacaacctcgctgtgctcatgcgggcagagactggaagcaggccttacaaagccgcggcggcccaattgccggagaccctagagaccattatgcttttggggttgctgggaacagtctcgctgggaatctttttcgtcttgatgaggaacaagggcatagggaagatgggctttggaatggtgactcttggggccagcgcatggctcatgtggctctcggaaattgagccagccagaattgcatgtgtcctcattgttgtgttcctattgctggtggtgctcatacctgagccagaaaagcaaagatctccccaggacaaccaaatggcaatcatcatcatggtagcagtaggtcttctgggcttgattaccgccaatgaactcggatggttggagagaacaaagagtgacctaagccatctaatgggaaggagagaggagggggcaaccataggattctcaatggacattgacctgcggccagcctcagcttgggccatctatgctgccttgacaactttcattaccccagccgtccaacatgcagtgaccacttcatacaacaactactccttaatggcgatggccacgcaagctggagtgttgtttggtatgggcaaagggatgccattctacgcatgggactttggagtcccgctgctaatgataggttgctactcacaattaacacccctgaccctaatagtggccatcattttgctcgtggcgcactacatgtacttgatcccagggctgcaggcagcagctgcgcgtgctgcccagaagagaacggcagctggcatcatgaagaaccctgttgtggatggaatagtggtgactgacattgacacaatgacaattgacccccaagtggagaaaaagatgggacaggtgctactcatagcagtagccgtctccagcgccatactgtcgcggaccgcctgggggtggggggaggctggggccctgatcacagcggcaacttccactttgtgggaaggctctccgaacaagtactggaactcctctacagccacttcactgtgtaacatttttaggggaagttacttggctggagcttctctaatctacacagtaacaagaaacgctggcttggtcaagagacgtgggggtggaacaggagagaccctgggagagaaatggaaggcccgcttgaaccagatgtcggccctggagttctactcctacaaaaagtcaggcatcaccgaggtgtgcagagaagaggcccgccgcgccctcaaggacggtgtggcaacgggaggccatgctgtgtcccgaggaagtgcaaagctgagatggttggtggagcggggatacctgcagccctatggaaaggtcattgatcttggatgtggcagagggggctggagttactacgccgccaccatccgcaaagttcaagaagtgaaaggatacacaaaaggaggccctggtcatgaagaacccatgttggtgcaaagctatgggtggaacatagtccgtcttaagagtggggtggacgtctttcatatggcggctgagccgtgtgacacgttgctgtgtgacataggtgagtcatcatctagtcctgaagtggaagaagcacggacgctcagagtcctctccatggtgggggattggcttgaaaaaagaccaggagccttttgtataaaagtgttgtgcccatacaccagcactatgatggaaaccctggagcgactgcagcgtaggtatgggggaggactggtcagagtgccactctcccgcaactctacacatgagatgtactgggtctctggagcgaaaagcaacaccataaaaagtgtgtccaccacgagccagctcctcttggggcgcatggacgggcccaggaggccagtgaaatatgaggaggatgtgaatctcggctctggcacgcgggctgtggtaagctgcgctgaagctcccaacatgaagatcattggtaaccgcattgaaaggatccgcagtgagcacgcggaaacgtggttctttgacgagaaccacccatataggacatgggcttaccatggaagctatgaggcccccacacaagggtcagcgtcctctctaataaacggggttgtcaggctcctgtcaaaaccctgggatgtggtgactggagtcacaggaatagccatgaccgacaccacaccgtatggtcagcaaagagttttcaaggaaaaagtggacactagggtgccagacccccaagaaggcactcgtcaggttatgagcatggtctcttcctggttgtggaaagagctaggcaaacacaaacggccacgagtctgtaccaaagaagagttcatcaacaaggttcgtagcaatgcagcattaggggcaatatttgaagaggaaaaagagtggaagactgcagtggaagctgtgaacgatccaaggttctgggctctagtggacaaggaaagagagcaccacctgagaggagagtgccagagttgtgtgtacaacatgatgggaaaaagagaaaagaaacaaggggaatttggaaaggccaagggcagccgcgccatctggtatatgtggctaggggctagatttctagagttcgaagcccttggattcttgaacgaggatcactggatggggagagagaactcaggaggtggtgttgaagggctgggattacaaagactcggatatgtcctagaagagatgagtcgcataccaggaggaaggatgtatgcagatgacactgctggctgggacacccgcatcagcaggtttgatctggagaatgaagctctaatcaccaaccaaatggagaaagggcacagggccttggcattggccataatcaagtacacataccaaaacaaagtggtaaaggtccttagaccagctgaaaaagggaagacagttatggacattatttcgagacaagaccaaagggggagcggacaagttgtcacttacgctcttaacacatttaccaacctagtggtgcaactcattcggaatatggaggctgaggaagttctagagatgcaagacttgtggctgctgcggaggtcagagaaagtgaccaactggttgcagagcaacggatgggataggctcaaacgaatggcagtcagtggagatgattgcgttgtgaagccaattgatgataggtttgcacatgccctcaggttcttgaatgatatgggaaaagttaggaaggacacacaagagtggaaaccctcaactggatgggacaactgggaagaagttccgttttgctcccaccacttcaacaagctccatctcaaggacgggaggtccattgtggttccctgccgccaccaagatgaactgattggccgggcccgcgtctctccaggggcgggatggagcatccgggagactgcttgcctagcaaaatcatatgcgcaaatgtggcagctcctttatttccacagaagggacctccgactgatggccaatgccatttgttcatctgtgccagttgactgggttccaactgggagaactacctggtcaatccatggaaagggagaatggatgaccactgaagacatgcttgtggtgtggaacagagtgtggattgaggagaacgaccacatggaagacaagaccccagttacgaaatggacagacattccctatttgggaaaaagggaagacttgtggtgtggatctctcatagggcacagaccgcgcaccacctgggctgagaacattaaaaacacagtcaacatggtgcgcaggatcataggtgatgaagaaaagtacatggactacctatccacccaagttcgctacttgggtgaagaagggtctacacctggagtgctgtaagcaccaatcttagtgttgtcaggcctgctagtcagccacagcttggggaaagctgtgcagcctgtgacccccccaggagaagctgggaaaccaagcctatagtcaggccgagaacgccatggcacggaagaagccatgctgcctgtgagcccctcagaggacactgagtcaaaaaaccccacgcgcttggaggcgcaggatgggaaaagaaggtggcgaccttccccacccttcaatctggggcctgaactggagatcagctgtggatctccagaagagggactagtggttagaggagaccccccggaaaacgcaaaacagcatattgacgctgggaaagaccagagactccatgagtttccaccacgctggccgccaggcacagatcgccgaatagcggcggccggtgtggggaaatccatgggtct

SEQ ID NO: 95 - DNA, 10807 bp, Artificial
  ZIKV HPF2013-EDE Null-Core and EDE1-Specific-Viral Genome
agttgttgatctgtgtgaatcagactgcgacagttcgagtttgaagcgaaagctagcaacagtatcaacaggttttattttggatttggaaacgagagtttctggtcatgaaaaacccaaaaaagaaatccggaggattccggattgtcaatatgctaaaacgcggagtagcccgtgtgagcccctttgggggcttgaagaggctgccagccggacttctgctgggtcatgggcccatcaggatggtcttggcgattctagcctttttgagattcacggcaatcaagccatcactgggtctcatcaatagatggggttcagtggggaaaaaagaggctatggaaataataaagaagttcaagaaagatctggctgccatgctgagaataatcaatgctaggaaggagaagaagagacgaggcgcagatactagtgtcggaattgttggcctcctgctgaccacagctatggcagcggaggtcactagacgtgggagtgcatactatatgtacttggacagaaacgacgctggggaggccatatcttttccaaccacattggggatgaataagtgttatatacagatcatggatcttggacacatgtgtgatgccaccatgagctatgaatgccctatgctggatgagggggtggaaccagatgacgtcgattgttggtgcaacacgacgtcaacttgggttgtgtacggaacctgccatcacaaaaaaggtgaagcacggagatctagaagagctgtgacgctcccctcccattccactaggaagctgcaaacgcggtcgcaaacctggttggaatcaagagaatacacaaagcacttgattagagtcgaaaattggatattcaggaaccctggcttcgcgttagcagcagctgccatcgcttggcttttgggaagctcaacgagccaaaaagtcatatacttggtcatgatactgctgattgccccggcatacagcatccattgcataggagtcagcaatagggactttgtggaaggtatgtcaggtgggacttgggttgatgttgtcttggaacatgatggttgtgtcaccgtaatggcacaggacaaaccgactgtcgacataactgtcgttacaacaacagtcagcaacatggcggaggtaagatcctactgctatgaggcatcaatatcggacatggagtcgcgagcaaagtgcccaacagccggtgaagcctacatagacaagcaatcagacactcaatatgtctgcaaaagaacgttagtggacagaggctgggattcaggatgtttcctttttggcaaagggagcctggtgacatgcgctaagtttgcatgctccaagaaaatgaccgggaagagcatccagccagagaatctggagtaccggataatgctgtcagttcatggctcccagaatagtgggaaaatcgttaatgacacaggacatgaaactgatgagaagagagcgaaggttgagataacgcccaattcaccaagagccgaagccaccctggggggttttggaagcctaggacttgattgtgaaccgaggacaggccttgacttttcagatttgtattacttgactatgaataacaagcactggttggttcacaaggagtggttccacgacattccattaccttggcacgctggggcagacaccggaactccacactggaacaacaaagaagcactggtagagttcaaggacgcacatgccacttacatcccagtcgtggttctagggagtcaagaaggagcagttcacacggcccttgctggagctctggaggctaaaatggatggtgcaaagggaaggctgtcctctggccacttgaaatgtcgcctgaaaatggataaacttagattgaagggcgtgtcatactccttgtgtaccgcagcgttcacattcacctctggaccggctgaaacactgcacgggacagtcacagtgttagtaggttacgcagggacagatggaccttgcaaggttccagctcagatggcggtggacatgcaaactctgaccccagttgggaggttgataaccgctaaccccgtaatcactgaaagcactgagaactctaagatgatgctggaacttgatccaccatttggggactcttacattgtcataggagtcggggagaagaagatcacccaccactggcacaggagtggcagcaccattggaaaagcatttgaagccactgtgagaggtgccaagagaatggcagtcttgggagacacagcctgggactttggatcagttggaggcgctctcaactcattgggcaagggcatccatcaaatttttggagcagctttcaaatcattgtttggaggaatgtcctggttctcacaaattctcattggaacgttgctgatgtggttgggtctgaacacaaagaatggatctatttcccttatgtgcttggccttagggggagtgttgatcttcttatccacagctgtctctgctgatgtggggtgctcggtggacttctcaaagaaggagacgagatgcggtacaggggtgttcgtctataacgacgttgaagcctggagggacaggtacaagtaccatcctgactccccccgtagattggcagcagcagtcaagcaagcctgggaagatggtatctgtgggatctcctctgtttcaagaatggaaaacatcatgtggagatcagtagaaggggagctcaacgcaatcctggaagagaatggagttcaactgacggtcgttgtgggatctgtaaaaaaccccatgtggagaggtccacagagattgcccgtgcctgtgaacgagctgccccacggctggaaggcttgggggaaatcgtacttcgtcagagcagcaaagacaaataacagctttgtcgtggatggtgacacactgaaggaatgcccactcaaacatagagcatggaacagctttcttgtggaggatcatgggttcggggtatttcacactagtgtctggctcaaggttagagaagattattcattagagtgtgatccagccgttattggaacagctgttaagggaaaggaggctgtacacagtgatctaggctactggattgagagtgagaagaatgacacatggaggctgaagagggcccatctgatcgagatgaaaacatgtgaatggccaaagtcccacacattgtggacagatggaatagaagagagtgatctgatcatacccaagtctttagctgggccactcagccatcacaataccagagagggctacaggacccaaatgaaagggccatggcacagtgaagagcttgaaattcggtttgaggaatgcccaggcactaaggtccacgtggaggaaacatgtggaacaagaggaccatctctgagatcaaccactgcaagcggaagggtgatcgaggaatggtgctgcagggagtgcacaatgcccccactgtcgttccgggctaaagatggctgttggtatggaatggagataaggcccaggaaagaaccagaaagtaacttagtaaggtcaatggtgactgcaggatcaactgatcacatggatcacttctcccttggagtgcttgtgattctgctcatggtgcaggaagggctgaagaagagaatgaccacaaagatcatcataagcacatcgatggcagtgctggtagctatgatcctgggaggattttcaatgagtgacctggctaagcttgcaattttgatgggtgccaccttcgcggaaatgaacactggaggagatgtagctcatctggcgctgatagcggcattcaaagtcagaccagcgttgctggtatctttcatcttcagagctaattggacaccccgtgaaagcatgctgctggccttggcctcgtgtcttttgcaaactgcgatctccgccttggaaggcgacctgatggttctcatcaatggttttgctttggcctggttggcaatacgagcgatggttgttccacgcactgataacatcaccttggcaatcctggctgctctgacaccactggcccggggcacactgcttgtggcgtggagagcaggccttgctacttgcggggggtttatgctcctctctctgaagggaaaaggcagtgtgaagaagaacttaccatttgtcatggccctgggactaaccgctgtgaggctggtcgaccccatcaacgtggtgggactgctgttgctcacaaggagtgggaagcggagctggccccctagcgaagtactcacagctgttggcctgatatgcgcattggctggagggttcgccaaggcagatatagagatggctgggcccatggccgcggtcggtctgctaattgtcagttacgtggtctcaggaaagagtgtggacatgtacattgaaagagcaggtgacatcacatgggaaaaagatgcggaagtcactggaaacagtccccggctcgatgtggcgctagatgagagtggtgatttctccctggtggaggatgacggtccccccatgagagagatcatactcaaggtggtcctgatgaccatctgtggcatgaacccaatagccataccctttgcagctggagcgtggtacgtatacgtgaagactggaaaaaggagtggtgctctatgggatgtgcctgctcccaaggaagtaaaaaagggggagaccacagatggagtgtacagagtaatgactcgtagactgctaggttcaacacaagttggagtgggagttatgcaagagggggtctttcacactatgtggcacgtcacaaaaggatccgcgctgagaagcggtgaagggagacttgatccatactggggagatgtcaagcaggatctggtgtcatactgtggtccatggaagctagatgccgcctgggacgggcacagcgaggtgcagctcttggccgtgccccccggagagagagcgaggaacatccagactctgcccggaatatttaagacaaaggatggggacattggagcggttgcgctggattacccagcaggaacttcaggatctccaatcctagacaagtgtgggagagtgataggactttatggcaatggggtcgtgatcaaaaatgggagttatgttagtgccatcacccaagggaggagggaggaagagactcctgttgagtgcttcgagccttcgatgctgaagaagaagcagctaactgtcttagacttgcatcctggagctgggaaaaccaggagagttcttcctgaaatagtccgtgaagccataaaaacaagactccgtactgtgatcttagctccaaccagggttgtcgctgctgaaatggaggaagcccttagagggcttccagtgcgttatatgacaacagcagtcaatgtcacccactctggaacagaaatcgtcgacttaatgtgccatgccaccttcacttcacgtctactacagccaatcagagtccccaactataatctgtatattatggatgaggcccacttcacagatccctcaagtatagcagcaagaggatacatttcaacaagggttgagatgggcgaggcggctgccatcttcatgaccgccacgccaccaggaacccgtgacgcatttccggactccaactcaccaattatggacaccgaagtggaagtcccagagagagcctggagctcaggctttgattgggtgacggatcattctggaaaaacagtttggtttgttccaagcgtgaggaacggcaatgagatcgcagcttgtctgacaaaggctggaaaacgggtcatacagctcagcagaaagacttttgagacagagttccagaaaacaaaacatcaagagtgggactttgtcgtgacaactgacatttcagagatgggcgccaactttaaagctgaccgtgtcatagattccaggagatgcctaaagccggtcatacttgatggcgagagagtcattctggctggacccatgcctgtcacacatgccagcgctgcccagaggagggggcgcataggcaggaatcccaacaaacctggagatgagtatctgtatggaggtgggtgcgcagagactgacgaagaccatgcacactggcttgaagcaagaatgctccttgacaatatttacctccaagatggcctcatagcctcgctctatcgacctgaggccgacaaagtagcagccattgagggagagttcaagcttaggacggagcaaaggaagacctttgtggaactcatgaaaagaggagatcttcctgtttggctggcctatcaggttgcatctgccggaataacctacacagatagaagatggtgctttgatggcacgaccaacaacaccataatggaagacagtgtgccggcagaggtgtggaccagacacggagagaaaagagtgctcaaaccgaggtggatggacgccagagtttgttcagatcatgcggccctgaagtcattcaaggagtttgccgctgggaaaagaggagcggcttttggagtgatggaagccctgggaacactgccaggacacatgacagagagattccaggaagccattgacaacctcgctgtgctcatgcgggcagagactggaagcaggccttacaaagccgcggcggcccaattgccggagaccctagagaccattatgcttttggggttgctgggaacagtctcgctgggaatctttttcgtcttgatgaggaacaagggcatagggaagatgggctttggaatggtgactcttggggccagcgcatggctcatgtggctctcggaaattgagccagccagaattgcatgtgtcctcattgttgtgttcctattgctggtggtgctcatacctgagccagaaaagcaaagatctccccaggacaaccaaatggcaatcatcatcatggtagcagtaggtcttctgggcttgattaccgccaatgaactcggatggttggagagaacaaagagtgacctaagccatctaatgggaaggagagaggagggggcaaccataggattctcaatggacattgacctgcggccagcctcagcttgggccatctatgctgccttgacaactttcattaccccagccgtccaacatgcagtgaccacttcatacaacaactactccttaatggcgatggccacgcaagctggagtgttgtttggtatgggcaaagggatgccattctacgcatgggactttggagtcccgctgctaatgataggttgctactcacaattaacacccctgaccctaatagtggccatcattttgctcgtggcgcactacatgtacttgatcccagggctgcaggcagcagctgcgcgtgctgcccagaagagaacggcagctggcatcatgaagaaccctgttgtggatggaatagtggtgactgacattgacacaatgacaattgacccccaagtggagaaaaagatgggacaggtgctactcatagcagtagccgtctccagcgccatactgtcgcggaccgcctgggggtggggggaggctggggccctgatcacagcggcaacttccactttgtgggaaggctctccgaacaagtactggaactcctctacagccacttcactgtgtaacatttttaggggaagttacttggctggagcttctctaatctacacagtaacaagaaacgctggcttggtcaagagacgtgggggtggaacaggagagaccctgggagagaaatggaaggcccgcttgaaccagatgtcggccctggagttctactcctacaaaaagtcaggcatcaccgaggtgtgcagagaagaggcccgccgcgccctcaaggacggtgtggcaacgggaggccatgctgtgtcccgaggaagtgcaaagctgagatggttggtggagcggggatacctgcagccctatggaaaggtcattgatcttggatgtggcagagggggctggagttactacgccgccaccatccgcaaagttcaagaagtgaaaggatacacaaaaggaggccctggtcatgaagaacccatgttggtgcaaagctatgggtggaacatagtccgtcttaagagtggggtggacgtctttcatatggcggctgagccgtgtgacacgttgctgtgtgacataggtgagtcatcatctagtcctgaagtggaagaagcacggacgctcagagtcctctccatggtgggggattggcttgaaaaaagaccaggagccttttgtataaaagtgttgtgcccatacaccagcactatgatggaaaccctggagcgactgcagcgtaggtatgggggaggactggtcagagtgccactctcccgcaactctacacatgagatgtactgggtctctggagcgaaaagcaacaccataaaaagtgtgtccaccacgagccagctcctcttggggcgcatggacgggcccaggaggccagtgaaatatgaggaggatgtgaatctcggctctggcacgcgggctgtggtaagctgcgctgaagctcccaacatgaagatcattggtaaccgcattgaaaggatccgcagtgagcacgcggaaacgtggttctttgacgagaaccacccatataggacatgggcttaccatggaagctatgaggcccccacacaagggtcagcgtcctctctaataaacggggttgtcaggctcctgtcaaaaccctgggatgtggtgactggagtcacaggaatagccatgaccgacaccacaccgtatggtcagcaaagagttttcaaggaaaaagtggacactagggtgccagacccccaagaaggcactcgtcaggttatgagcatggtctcttcctggttgtggaaagagctaggcaaacacaaacggccacgagtctgtaccaaagaagagttcatcaacaaggttcgtagcaatgcagcattaggggcaatatttgaagaggaaaaagagtggaagactgcagtggaagctgtgaacgatccaaggttctgggctctagtggacaaggaaagagagcaccacctgagaggagagtgccagagttgtgtgtacaacatgatgggaaaaagagaaaagaaacaaggggaatttggaaaggccaagggcagccgcgccatctggtatatgtggctaggggctagatttctagagttcgaagcccttggattcttgaacgaggatcactggatggggagagagaactcaggaggtggtgttgaagggctgggattacaaagactcggatatgtcctagaagagatgagtcgcataccaggaggaaggatgtatgcagatgacactgctggctgggacacccgcatcagcaggtttgatctggagaatgaagctctaatcaccaaccaaatggagaaagggcacagggccttggcattggccataatcaagtacacataccaaaacaaagtggtaaaggtccttagaccagctgaaaaagggaagacagttatggacattatttcgagacaagaccaaagggggagcggacaagttgtcacttacgctcttaacacatttaccaacctagtggtgcaactcattcggaatatggaggctgaggaagttctagagatgcaagacttgtggctgctgcggaggtcagagaaagtgaccaactggttgcagagcaacggatgggataggctcaaacgaatggcagtcagtggagatgattgcgttgtgaagccaattgatgataggtttgcacatgccctcaggttcttgaatgatatgggaaaagttaggaaggacacacaagagtggaaaccctcaactggatgggacaactgggaagaagttccgttttgctcccaccacttcaacaagctccatctcaaggacgggaggtccattgtggttccctgccgccaccaagatgaactgattggccgggcccgcgtctctccaggggcgggatggagcatccgggagactgcttgcctagcaaaatcatatgcgcaaatgtggcagctcctttatttccacagaagggacctccgactgatggccaatgccatttgttcatctgtgccagttgactgggttccaactgggagaactacctggtcaatccatggaaagggagaatggatgaccactgaagacatgcttgtggtgtggaacagagtgtggattgaggagaacgaccacatggaagacaagaccccagttacgaaatggacagacattccctatttgggaaaaagggaagacttgtggtgtggatctctcatagggcacagaccgcgcaccacctgggctgagaacattaaaaacacagtcaacatggtgcgcaggatcataggtgatgaagaaaagtacatggactacctatccacccaagttcgctacttgggtgaagaagggtctacacctggagtgctgtaagcaccaatcttagtgttgtcaggcctgctagtcagccacagcttggggaaagctgtgcagcctgtgacccccccaggagaagctgggaaaccaagcctatagtcaggccgagaacgccatggcacggaagaagccatgctgcctgtgagcccctcagaggacactgagtcaaaaaaccccacgcgcttggaggcgcaggatgggaaaagaaggtggcgaccttccccacccttcaatctggggcctgaactggagatcagctgtggatctccagaagagggactagtggttagaggagaccccccggaaaacgcaaaacagcatattgacgctgggaaagaccagagactccatgagtttccaccacgctggccgccaggcacagatcgccgaatagcggcggccggtgtggggaaatccatgggtct

SEQ ID NO: 96 - protein, 317 aa, Artificial
  DENV4 Backbone with ZIKV Z20 Epitope (version 2)
MRCVGVGNRDFVEGVSGGAWVDLVLEHGGCVTTMAQGKPTLDFELTKTTAKEVALLRTYCIEASISDMATATRCPTQGEPYLKKEQDQQYICRRDVVDRGWGNGCGLFGKGGVVTCAKFACSGKITGNLVQIENLEYTVVVTVHNGDTHAVGNDTSNHGVTATITPRSPSVEVKLPDYGELTLDCEPRSGIDFNEMILMKMKNKTWLVHKQWFLDLPLPWTAGADTGTVHWNYKERMVTFKVPHAKRQDVTVLGSQEGAMHSALAGATEVEMDGDGNHMFAGHLKCKVRMEKLRIKGMSYTMCSGKFSIDKEMAETQ

SEQ ID NO: 97 - protein, 398 aa, Artificial; identical to SEQ ID NO: 24
  DENV4 Backbone with EDIII from ZikV (version 2)

What is claimed is:

1. A method of protecting a fetus from the effects of Zika virus infection, comprising administering to the fetus and/or the mother of the fetus an effective amount of an EDE1 antibody and/or an epitope that binds an EDE1 antibody.

2. A method of producing an immune response to a Zika virus in a subject, comprising administering to the subject an effective amount of an epitope that binds an EDE1 antibody.

3. The method of claim 1, wherein the EDE1 antibody is selected from the group consisting of C8, C10 and any combination thereof.

4. A chimeric flavivirus E glycoprotein comprising amino acid residue substitutions that introduce a heterologous epitope that induces an antibody response to Zika virus, selected from the group consisting of:
a) Zika virus backbone with DENV1 “5J7” epitope;
b) Zika virus backbone with DENV2 “5J7” epitope;
c) Zika virus backbone with DENV3 “5J7” epitope;
d) Zika virus backbone with DENV4 “5J7” epitope;
e) a DENV1 backbone with “5J7” Zika epitope;
f) a DENV2 backbone with “5J7” Zika epitope;
g) a DENV3 backbone with “5J7” Zika epitope;
h) a DENV4 backbone with “5J7” Zika epitope;
i) a DENV1 backbone with EDIII from Zika;
j) a DENV2 backbone with EDIII from Zika;
k) a DENV3 backbone with EDIII from Zika;
l) a DENV4 backbone with EDIII from Zika;
m) a DENV1 backbone with “Z20” Zika epitope;
n) a DENV2 backbone with “Z20” Zika epitope;
o) a DENV3 backbone with “Z20” Zika epitope;
p) a DENV4 backbone with “Z20” Zika epitope;
q) a DENV1 backbone with “Z3L1” Zika epitope;
r) a DENV2 backbone with “Z3L1” Zika epitope;
s) a DENV3 backbone with “Z3L1” Zika epitope;
t) a DENV4 backbone with “Z3L1” Zika epitope;
u) a DENV1 backbone with “Z20” and “Z3L1” Zika epitopes;
v) a DENV2 backbone with “Z20” and “Z3L1” Zika epitopes;
w) a DENV3 backbone with “Z20” and “Z3L1” Zika epitopes;
x) a DENV4 backbone with “Z20” and “Z3L1” Zika epitopes;
y) a Zika virus backbone with a DENV1 C10 epitope;
z) a Zika virus backbone with a DENV2 C10 epitope;
aa) a Zika virus backbone with a DENV3 C10 epitope;
bb) a Zika virus backbone with a DENV4 C10 epitope;
cc) a Zika virus backbone with a DENV1 C10 epitope (non-neurotropic);
dd) a Z y) a Zika virus backbone with a DENV1 C10 epitope;
z) a Zika virus backbone with a DENV2 C10 epitope;
aa) a Zika virus backbone with a DENV3 C10 epitope;
bb) a Zika virus backbone with a DENV4 C10 epitope;
cc) a Zika virus backbone with a DENV1 C10 epitope (non-neurotropic);
dd) a Zika virus backbone with a DENV2 C10 epitope (non-neurotropic
ee) a Zika virus backbone with a DENV3 C10 epitope (non-neurotropic);
ff) a Zika virus backbone with a DENV4 C10 epitope (non-neurotropic);
gg) a Zika virus backbone with a DENV1 C8 epitope;
hh) a Zika virus backbone with a DENV2 C8 epitope;
ii) a Zika virus backbone with a DENV3 C8 epitope;
jj) a Zika virus backbone with a DENV4 C8 epitope;
kk) a DENV1 backbone with a ZIKV C10 epitope;
ll) a DENV2 backbone with a ZIKV C10 epitope;
mm) a DENV3 backbone with a ZIKV C10 epitope;
nn) a DENV4 backbone with a ZIKV C10 epitope;
oo) a DENV1 backbone with a ZIKV C10 epitope (neurotropic);
pp) a DENV2 backbone with a ZIKV C10 epitope (neurotropic);
qq) a DENV3 backbone with a ZIKV C10 epitope (neurotropic);
rr) a DENV4 backbone with a ZIKV C10 epitope (neurotropic);
ss) a DENV1 backbone with a ZIKV C8 epitope;
tt) a DENV2 backbone with a ZIKV C8 epitope;
uu) a DENV3 backbone with a ZIKV C8 epitope; and
vv) a DENV4 backbone with a ZIKV C8 epitope.

5. A method of treating a Zika virus infection in a subject, comprising administering to the subject an effective amount of the chimeric protein of claim 4.

6. A method of protecting a subject from the effects of Zika virus infection, comprising administering to the subject an effective amount of the chimeric protein of claim 4.

7. A method of protecting a fetus from the effects of Zika virus infection, comprising administering to the fetus and/or the mother of the fetus an effective amount of the chimeric protein of claim 4.

8. A method of reducing the complications caused by Zika virus infection in a subject, comprising administering to the subject an effective amount of the chimeric protein of claim 4.

9. A method of treating a disorder caused by Zika virus infection in a subject, comprising administering to the subject an effective amount of the chimeric protein of claim 4.

10. A method of producing an immune response to a Zika virus in a subject, comprising administering to the subject an effective amount of the chimeric protein of claim 4.

11. A method of preventing a Zika virus infection and/or preventing the effects of a Zika virus infection in a subject, comprising administering to the subject an effective amount of the chimeric protein of claim 4.

12. A chimeric flavivirus E glycoprotein comprising substitutions in the amino acid sequence that ablate an epitope that induces an immune response to Zika virus, selected from the group consisting of:
a) a Zika virus backbone with “Z20” epitope ablation by DENV1;
b) a Zika virus backbone with “Z20” epitope ablation by DENV2;
c) a Zika virus backbone with “Z20” epitope ablation by DENV3;
d) a Zika virus backbone with “Z20” epitope ablation by DENV4;
e) a Zika virus backbone with “Z3L1” epitope ablation by DENV1;
f) a Zika virus backbone with “Z3L1” epitope ablation by DENV2;
g) a Zika virus backbone with “Z3L1” epitope ablation by DENV3;
h) a Zika virus backbone with “Z3L1” epitope ablation by DENV4;
i) a Zika virus backbone with “Z20” and “Z3L1” epitope ablation by DENV1;
j) a Zika virus backbone with “Z20” and “Z3L1” epitope ablation by DENV2;
k) a Zika virus backbone with “Z20” and “Z3L1” epitope ablation by DENV3;
l) a Zika virus backbone with “Z20” and “Z3L1” epitope ablation by DENV4;
m) Zika virus backbone with EDE1 epitope ablation;
n) Zika virus backbone with core ablation;
o) Zika virus backbone with EDE1 epitope and core ablation;
p) DENV1 backbone with EDE1 epitope ablation;
q) DENV1 backbone with core ablation;
r) DENV1 backbone with EDE1 epitope and core ablation;
s) DENV2 backbone with EDE1 epitope ablation;
t) DENV2 backbone with core ablation;
u) DENV2 backbone with EDE1 epitope and core ablation;
v) DENV3 backbone with EDE1 epitope ablation;
w) DENV3 backbone with core ablation;
x) DENV3 backbone with EDE1 epitope and core ablation;
y) DENV4 backbone with EDE1 epitope ablation;
z) DENV4 backbone with core ablation; and
aa) DENV4 backbone with EDE1 epitope and core ablation.
